United States Patent Application Publication US 2023/0172999 A1 - sequence listing, part 4

SEQ ID NO: 7 - protein, 875346 aa, Faecalibacterium prausnitzii (residues 1-291,782 of 875,346)
  misc_feature (47523)..(47526): Xaa can be any naturally occurring amino acid
  misc_feature (112763)..(112766): Xaa can be any naturally occurring amino acid
  misc_feature (321327)..(321380): Xaa can be any naturally occurring amino acid
  misc_feature (424212)..(424215): Xaa can be any naturally occurring amino acid
  misc_feature (432325)..(432328): Xaa can be any naturally occurring amino acid
  misc_feature (457136)..(457139): Xaa can be any naturally occurring amino acid
  misc_feature (514011)..(514014): Xaa can be any naturally occurring amino acid
  misc_feature (657303)..(657328): Xaa can be any naturally occurring amino acid
  misc_feature (717338)..(717341): Xaa can be any naturally occurring amino acid
  misc_feature (731633)..(731636): Xaa can be any naturally occurring amino acid
  misc_feature (736557)..(736560): Xaa can be any naturally occurring amino acid
  misc_feature (751491)..(751494): Xaa can be any naturally occurring amino acid
  misc_feature (752675)..(752733): Xaa can be any naturally occurring amino acid
  misc_feature (783377)..(783382): Xaa can be any naturally occurring amino acid
  misc_feature (831597)..(831600): Xaa can be any naturally occurring amino acid
  misc_feature (833888)..(833891): Xaa can be any naturally occurring amino acid
  misc_feature (874884)..(874961): Xaa can be any naturally occurring amino acid
MWNELGISGGTAIVILIALYYVIKWAVRNGIKEAYRAITGEKTNEDIQNEKELKELGLDSEDQMEYKRFGNKIIVRIDKDEEILEQVKKLALKENIRLAAVQALGATNSFTVGVYNVVEKQYYANSFSGSFEIVSLTGTINTMNGEFYTHLHMSAGNDKGEVFGGHLNRAVVSATCEMVVDVLDGTVDRQYDPVTGLNLFKFMKRRDFCKGLAVTLAAGALAPAAALPQAGAATALVGRAVPDDYYTLWYRSDRCGADLRHDYYYSDSLFDHPATEYDNQLALATLGMAAAADCPWESDQRYWMEGEVGRADHIRDAFAKLGFTEVQLFNYTHSLNDTPDTVGCAIARKTLVRGGRQVTIIGAFLRGSGYGAEWSGNLHAGPGSAHVGFVTAARQLVEKIRGYVQTSAKRQPLGTLKLWMGGYSRGGGVANLVAARLPAVLPQLEKKNTFVYTFAAPASLTAADCPDLQQDYDNNHAADGSLKKNWGTSNIFNIVSSGDVIPRILPAEWGFYRNGNDRFLPSTVIPEELEALNDRSAGMEGTPIDFGRLAVSEETDAVLRSMLDLFCDRQTYYEDYEDAMRCMLQCATTRTEEEVTRGIVRDDAAVVAQLRSMELMQRFPQEKVERCVQAASALSRPVLEKLGSAVPLQAQQIVIPMLAVGLCFELQPETVQLVADFVLSTITVKGQLSGILKTVLCHFQENYITVLEAYDPADHGMTPYTRREELMTEGVSPSRLPLQVKIASYGKKVYTIKKPAVHRPQERMRGMKPMTLFSYEIFDAVARQGSFNKAAQQLHLTPSAISHAIAVMEEELGFALFNRGKNGVSMTSYGASLYPSIRDVLNSDEALKQSIARLNGLEKGKVKLGVFNSVCASLLPGLLKSFAAHYPQIEIEVYQGTYDDVKEWLRTGQVDIAFLSSTCREEFNLTELFREPLLCIVPQDWPEPQDGVMTPALMNGQSFVVQCDATDAEMRQFLKKYKIGTERRCHVIDDQSNIAMVEAGLGISIMPQMLLRDCKAAVKVYPIEPEEYRVVGLAVQRPASMAPAVEQMFHHIVEYCHELDLSLMIVLSRAFSVKHFAPIFARSVQILPRFLQEMPPLLRYSSCNDFMTALSPRRTFSGTALKTIACITMLVDHIGASCIEAGILTPGLDAGTLSQDTLSAYPLYRLDMVLRFTGRLAFPLFCFLLVEGFVHTHNVKGYLGRLVLFGLLSEVPFDLAFFRTPFDPSAQNVYWTLALGVLAMAGLKRFEKENGLPGWQGLVWAGGCAALALAANTDYNASGVIIICALYLTRTNRKWQCLAGALLFMFELTAPLAFVLIWFYNGQRGACSPLQKKAFYWFYPVHLLVLAGITNLLLMVYVGFIIQQKDVSVKRKSKKTSNKGCDKCACCAAIVQKKEKFAMSFSELLKQCRKKQGVSQAELASRLGVTQQAVGKWESGKSSPDPSTVARIAELLNTTADYLLGLYRPVSNVSAPEERFFGSYTESLIPVIGTVKAGYGALAFEEDYGQEYARVKDPSNYFYLVVRGDSMEPRIQDGDLALVHKQDTLENGDLGVLIYGDEGEGTLKRYIQRGNCVVLQPFNPAYHEMVIRGEDLNHLHIAGRVVETKAKWMEQTLMDKLTILADSAKYDVACTSSGASRTARPGTVGSCYAPGCCHAFTADGRCVSLLKVLMTNCCSFDCGYCVNRRSNDIPRATFAPRELAELTMEFYRRNYIEGLFLSSAVLGTPDYTTERMLAVLRLLRGEYRFGGYIHAKAIPGTSPELLQQLGYLADRLSVNVELPSERSLNLLAPDKGRHSIFRPMKQIAMSGAASREELTLYRHAPKFAPAGQSTQMIVGASPETDYHILKLTEGMYQKYGLKRVFYSAYIPVAEDTRLPALDTKPPLLREHRLYQADWLLRFYQFEADEILDKDNPNFNPYLDPKCNWAVPHYGLFPVDVNRAPFEMLLRVPGIGPKSARRIWRARKQAALGLDELKRMGVVLKRAQYFITCRGFSGAHPGRGTAGRERITRALIDPNVFSGSCEQLSLFSPPAVDNLIGQGVPPRAAVRMVREEAVQCLAKALMSCQGTVSPKGARKLHDADVVYLYDGSFEGFLCCVYESFAQHELPFAVWTPQRETATLYPVKDIATDPAVARRVFASFGKKLGAETEYLVSRDFLSGQEDKELLLLRFLHLAFALGPGTVKREGHPVVAPLYAMKKSLDWEVDKFQGFVRFEEHNGMLGAVIHPKNYILPLLRPHFCGRFPEEDFMIYDAVHQAVLLHEGRSTRLLELAAPLELPPPSAREQQFQALWTQFYKTLEIQARHNEKGRMTHCPKRFWADMVELQGELMKSDFLTNLFFRALQTVSIATMIVRLLLPVAIVAALYLLWRIARNLEKPPKLTEEVKIVRKSLSEMLKENRTRCKMTQEFVAETIGVSRQAVSKWENGTSEPNTSNLMALARLYGIPAEDLLKGVESALEAQEKMVRITMEDGGIIDIELNEEVAPITCENFKKLVKEGFYNGLTFHRVIPGFMIQGGCPLGTGTGGPGWNIKGEFAANGVNNPLKHTRGVISMARSMNPNSAGSQFFIMHQDAPHLDGQYAAFGKVVAGMDVVDKIAAVRTDWNDKPTTPVKMKTVELIEGMEKYDLIIVGAGPAGIFTAVELLRHGSKKKMLLVEKGKPVEKRHCPKAEVGHCVNCRPTCAITTGFSGAGAFSDGKLSLSYEVGGDLPTLIGEEFAQELIDYTDKIYLEFGADPHVEGIYTGEDIKEIRKNAIHAGLKLVDCPIRHLGTEKAQELYLAIQNYLADNGVEMRFNTECENIILEEEGCKGVLLKDGDSLLPVYADEVVIGTGRRGADWLEKLCAEHHIAHKPGTVDIGVRVECRNEVMEKVNKVLYESKLIGYPKPWKNKVRTFCQNPGGFVAQENYDNDLAVVNGHSFKEKKSPNTNLAILVSHNFTEPFNQPIAYAQKVGELTNMLGAGHIMVQRYGDILDGKRTWQKELAQSNVKPTLKDAVAGDITAAMPYRAMTNIIEFIKMLDMVVPGFAANETLLYSPELKFYSNKVKMDENLDTNIQGLHCLGDSSGWTRGLMMASVMGVLMGRKLAEKEGCMVKKLKWNLILMSLLYVGLGIFLVMKPGTALNIVCYALGGVVLACAAVQLIRYFVVERGVFQSQLTLISGLICLALGVFLLLRSDIVVSILPIVFGLFVIFDAIGRVQNALDLRRCGYDSWKGFLLLPVLSVVLGVILIANPFGAMETLVMAIGVILIVEGAINLLSALYTVLAVRRFAKLHPETQSVLESITGEDLNGDGVVAPDVTRTDAEATAVELDHVDESATVEQEKREMKTNQSQTAPAEVRENIMGTMEINPLLLKLSIPMMISMLVQALYNVVDSVFVSHVSESALTAVSLAFSLQNVMIAVGVGTGVGVNALLSKSLGEKNQSRANATAENGIFLSLCSFAVFFVIGLTCMKPYFYAQTSDPVIAQQGIRYLSVCCNFSLGLFTQTMGEKLLAATGRTYLSMISQLVGAVVNIILDPIFIFGYCGEALSGTTGAAVATVIGQFCGAGMTLYFNTRKNPDIQISFKGFRPSAKAIGRIYTVGLPSIAMQCVGSLMTFGMNLILMAFSATAVAVFGVYFKLQSFVFMPIFGLNNGMVPIISYNYGARRPNRVKKTIKLAVCYAEGIMLAGFCIFQFAPRQVLSIFAASDAMLAIGIPAMRIICLHFLLAGVSIVLSSVFQALGNGVFSLIVSVCRQLFVLLPAAWLLAQTGSVNNVWWAFLIAEVVSILMSLVFYARINKTTIAPLYHMAKTIITLGREYCTGGRFIAEDVANALGIKLYDKELITMAAKNSGLSEEAVAASEKRHTHSLLYSLYTMGNELPLGDQVFILQSRIIKQLAEEGPCVILGRCGDYVLRERKDVLRVFVYAPKEWRLQYAKTNPLVKAKDEKGIKDEVEKTDRNRSAYYNYYTQNRWGDAHNYDLAINAALGRETCVKMILDAAAAKEKTLMEQRNNLVLQGTETFSRGQLDNLALENGALVLDSVAGRSLLYGSYTTPEFAMPAFCNLNVSWNAHAPRDTMVEVRCRVYAAGAWTAWMSFGKWAPDYPRCSVSSQSEDGMIFLMGDTVTVAAPGGGTGVQLQVNLSTNNDKVTPAVRLLAAAVRPLAWEKRNGHALNRRLYLPEYCLSAHDPSFGREMDLPLVMAALMNRWGEDILPEEVAYAMEDGSTRSTGNTAFAAAAAGCCGYPCWQAWMDLADLREQIHDGCSVAVQVERRVRGQRDPVRLWMGLHGFGHDDAVMADFVLLNDPTADTDGAVNCTMALVDFMRYFTGKAIVLRPKQREVEADRPRRLRCELRAGTQPGVYYFERRGEPADLPEDFSGWIACAPHDGVAHATTAHRTFLRCTRTEDGGVQFPPELLAAGGRCSVYAVDQTGTMRVAEVRLPKPKPVPASTEPKANGQTGDAPAQPMGLFPSANDFKAGKGVEKDAPRKTGIGRFFELVGRDMNGMFLANLLTCIGFAPVICLVYIGFLQNSLPVMLGSAAVGGLLAGPALAGMYDTVLRALRDEAGYWWVTYRKAFKRNFKASLVPGVLYTVVVTLQIFLVYFCFNMLYHGTNVGVPLWVATVLNLVLFQMLFAYMWPQVVLLDQPLSLTLKNSINCMIAFLPHALAAAIVQVLFWGVVILCMPLGLFLMLIFGFWFVTEVSCQIVYGDIDRVFHIEENIRKMKDAELEAALKEDYADDDTPEEMSGKCHCANFTDINIPVFCQLCKIQPGLIVKKYLSLPFLRKMCYNDNGIFCNRRKLLMSILRTIAMFIYLFGYMILHYGILRRAERAAAAGDTATVEQIVNQHIPRWSRGILKVTGVSLSVEGLENIPKDRPCVFVANHRSYYDIPLLLAGLEKPHGILAKEELEKIPLLNRWMKLLGCVFVQRDDVRASVRALNDATAIVEGGRSFVIFPEGTRYKGEEGGAGEFKAGAFRIAVKTGAPVIPVAVTGARALFETNGNRCRPGSVRIKIMSPIQTAGMSKAEQKQLPDAVRQSILAALKMASYRYERDIDPKDLKPRKQRQYSRRERWANWWDYNLKWVLLFGIAGAFVAYCFIGQYFLTTHPDYNVAVVSPYYLPEATVTALQEQLAAYGEDCNGDGKVVVKINQYTMAFNSEDSDAYLDMAGTTKLSTDIQSSLSSIFILYDPAGFQQTTGTLRYLDGHLPKSDADSDWWNMVYRWTDCPVLTGMELGSYTSDAVQSASGDSQQLLADYYIGIRGAWLKESASLLENSEPLWANLTAGAVSTAGEGHMRFRIKAGGPAARFTFDRTPKPQPPAPPVLRAADLDNPYGRYYGKARSWEDILKNKNSDMDALEQARAEIDTVDAQLAALFERRMAAVLQVAEYKRAHGLPIYDAAREAAVLEKAAARIQQPALRPYYKDHVQHMMDIAKQYEAAVLGRNRAAYQGVEGAFAHIALKALFPHAEAVSYSTWDEVFEAVASGEAAHGVVPFENSHAGDVSAVLDLCYNHPELWVVDVYDLPISQNLLVLPGTQLSQLRTVYSHQQAIAQSETFLKQFRLPATAMANTAMAAKFVAESKDPTKAAIASAETAALYGLEILVPNINTDGDNTTRFIVLSREKPTAGNRFSLLFTVDNKPGKLAEVIQVIGASGFNMESIKSRPMPHVPFEYYFYVELVGDAAAGETAALLRELDRTCRTVRLLGVYTKMSDFIGTKLTMNLGERSYDIIVKRGSLENLYQFARLDRRVAVVTDSGVPAQYAQMVADQCKDAAIITVPQGEASKSFKILETVLRQMLDFGMGRGDLVVAVGGGVVGDLAGFAASIYMRGIDFINCPTTTLSMIDSSIGGKTAVDLGDTKNIVGAFWQPKLVIVDPDTLSTLPRRHFINGLAEAVKAGLLADPELFSIFEKEDVDDRIGDIICRSLRFKKSIVEQDETEQGMRKALNFGHTIGHGIEAVKGIKGRRTTGLFHGECVALGMLPMIESKALQKRVRGVYRRLGLPTRTAYDKEKVLAEMLHDKKAQDGQITIIKVPGLGCWRAETIPVEGLRPLLGMEDMKNTFGSDLSLTIFGESHGRAVGAVLDGMAAGVPVDESFLAACMDKRRARGDGLSTPRVEADAVQLLSGVVNGHTTGTAIALMIENQNTRSGDYAKTADLLRPGHADFTAYAKYHGFQDARGGGHFSGRVTAALVAGGSIVLAALQRAGIDITTHIARCAGLADTPFALDDPAALAAQVETLASKTEGFAVLDAAVEEPMKAAIRAAGAEGDSVGGVLETAILGLPAGIGEPYFDSVESEIAHLAFSIPAVKGIEFGTGFGFAGLRGSEANDAFRMTAEGAVVTATNHNAGINGGIANGMPVVFRTAVKPTPSIYKQQDTVDYIAKKDAQLSIQGRHDPCIVPRAAIVQTCAAALAVGDLLTARYGARWMTDPTGYRKEAMEYGLIGGKLGHSYSKTIHELLCGYSYELCPLPTEADARAFLQRRQFKAINVTIPYKKLVMEYCSFIDPRARAIGAVNTVVNKNGLLYGYNTDYLGFAHLCEAHGVELAGKTVLILGTGGTHNTTRAVALDKGAAKVLTVSRTPDPEKGELSYAEAVRSGALVVFNTTPAGMYPNVGVCSLDVAAMPGLEAVVDVVYNPNKTELILRAEDAGVPVAVGGLEMLVAQAVYAAEYFLGRKFEDAPGEVRRITAALRRETLNIALVGMPSCGKSTLGRLLAKQLGRPLVDLDEEIVKADGRSIPDIFAAEGEEGFRAKEAAQIARFGKEKGLVLSCGGGAVKRAENVRALRQNGVVLFIDRPVEALAVGGDRPLSSSAEALRTMEAQRRPLYLAAADAVISNTGTLAEALAAAQEALDEIFDSMDYTGLMDYVQAGCDQLGIETDICQSNHEGDLIDEIQSAPGRVDGIVLNPGGYAHYSVAILDALRLCSVPAVEVMLDAPDEREPFRKTDVVSFGCQGHFIGEGPQGYLHACIWLAQLLRTDGSSKAHIVMMKHATVNKNYKMLGTARALRRTSTAQERKLWYLFLRDYPVKIYKQRIIESFVVDFYCAQARLVIELDGSQHYTEQGKAYDAERSAVLEQYGLLVLRFANNDVDNHFNAVCTQIDNTIQSRLQSMIISTKKGTPKEELEKIVDKFENQGLDVTLITGKDYNVFGLVGDTTKIDERDVLANPWIDNVTRVSAPYKRANRLFHPADSVIDCGGVKIGSKEKIAVMAGPCSIENAEQALRIAQGVKAGGAALFRGGAYKPRTSPYAFQGLETEGILDMVKAREATGLPIVSELMSEDRIPEFEEYVDVVQIGARNMQNFQLLKAVGKMHKPVLLKRGLCNTIEEWIMSAEYIMAGGNEQVIFCERGIRTFEKYTRNTLDLSAVPIIHEKTHLPIVVDPSHATGKANLVEPMMIAAVAAGADGLEVEVHYDPQHAWSDGAQCLTPDAFAQAMAKCRQVAWAIGREMMLVTIRPAPGGIGGVIAAPPSKSMAHRAVLCAALAVGRSHITHLEFSKDISATLSAAAQLCAAVGTGADDATVQGLGHFLPLTAPVDCCESGSTLRFLIPIASLTGQPVTFTGRGRLMERPQCVYETLYREQNLRFEQSLSGLTVEGALTPGDYRLAGNVSSQFISGLLFALPLLPGDSQLHLIPPVESRSYIDMTRAVQAAFGVHSRWLDETTLLLPGGQQYHPCDYNVEGDYSQAAFPAVLGAVCGGVTITGLAPDTLQGDAAILDILRRCGAVFTRKGDSVTFEKAPLHGVDIDLADCPDLGPVLMVLGLLCEGTTFIRNAERLRMKESDRIAAMEAELRACGGVLESDGGTITVHGCAERLHAPAAPLHGHNDHRVVMSLAVLAAAAALPLTVDDAEAIQKSWPGFFADAAPLGVEVEDAMLDKTKRYLVVGLGLLGGKYALELTRAGFHVDGINRSEGHLQYALEHGYIAGGKTHDFEDLVRQADHIIFGLYPTALLDWFGTYGHLLKPGCIFTDVSGVKTGLVEPVQALCPAGVEFIASHPMAGRETSSVEHAAEVNFAPANFIITPTEKNTPAGIQWARELAEVLGFKHICTLTVQEHDRMIGYVSQLCHAIAVSLMCANDNSSLCEYTGDSFRDLTRIARINDKMWAELFLWNKQNLISEIDQFDSALQEMRAALVADDRDKLEQMFRLSTQRRAAFDKKLPEMPKQEGQKSKLVTLLRILEQRTDENHRLNVPQLVQLLENQGILAERKSIYSDIDTLRSLGYDIQLQRGRGGGYWMASRAFELSELKLLVDAVQSSSVISARTSKRIIHKLEALCSDYEGTQLQRQVYVDGRPKTDSQTLLYSIDALHTAINRGCLVQFRYKGSSAVRTVSPWQLAWENGCYYLIAYQDEKAPPVRHYRVDRMAGVLVLDEPRRGKEFFRTFDLPAYLRKHFNMFGGTEYRVTLRCAADLEPVMRERFGREPVFCPEDAEHFHFDVPICVSQQFFGWVCGFGGKVEVTAPAAVRAQLHEMVQGLAEQHEMAYTDDWESLMNGVFGAGGKLKFGGAQPQPEKPQPEKPAGSGLPDLNAALLEQQKQLDELLKQQNARLKAQDAGVQTALEDSRRMLRDMEADGLLAKGTADTKPEQLGSFEGLAAEVKKTVLGQDAFVDSVVRAMRRPFVLGTEGAAARNVILLWGAPGTGRHFALAETARIMAARGLLQSDRMAVMDLALYPDPGAEKLFLQDLYAALHAPGEIVVFEHYESCHPGFLRILSDLAVKGSAPLSSRYLVNKEGILVEAGTALAPGAVSRIDPCGKYLIFFSRKGREALADKFGASFVAAVGDVCQTAPFTPEALAALAAQQLNALAQRVNSRLGLTLTAGAEVRDYVAAQCSKEKGAEGLADCCERIFRALSEYCLQTDAKLSGTVALTAAPEGLQFALNGAAPADLFSLLPAAYTGAVEQIRAELDALVGLAPVKEYVFGLADNLQVQQRRAAAGFKTASLSMHMIFTGNPGTGKTTIARLVAKYLKAIGALGGGQLVEVTRADLVGRYTGHTAPLTNSVIESALGGVLFIDEAYSLYRGQQDSFGLEAIDTLVKGMEDHRDELVVILAGYTKEMEVFLTANSGLASRFPNKIEFPDYTADELLDITAVLAKGKGYRLAEGCTFPLLGYYKRRQALDSRTAGNGRLARNTLEKAIFNQSRRLIAEPAAELDLIQPSDLEFEEMKTLFRILGTAAAVAVTGAAIVVLDKILNQKDPLHVEAVEFPEDAEKDAEEAEKTAEAYEEAEAKEEAKAADAAAEAAEEAAPEAPAPAENAPQTQPETAEERPVYDPEAPNANPVEAGPAVAPKDENGKIDVTKIADANDFGDWEEQGCKGMAKEIPVYLFVGFLESGKTKFIQETFEDPNFDSGDKTLLLICEEGEEEYNEKKFAFPGVTVKVLEDKSELNPQNLAKLGKEADAGRVVIEYNGMWLLQDLADALPENWLVYQCIATADGTTALTYARDNSMRSLMLDKIARSELIVFNRAEAVNNDDARQELHKLVRQASRKCDIAYEFKDGSVAYDDIPDPLPFDINADPIDIPDDDFGIWYMDCQDEPQKYTGKTVRFLAQVCQTNRAGKNSFVPGRFAMTCCVQDIQFVGFPCSYDGYKALEQRAWVRVTAKVGYKFHNIYRGKGPVLTAVSVEPAEKPLEEVVTFSMTKIDIFSGFLGAGKTTLIKKLITEAFAGQQVVLIENEFGEIGIDGGFLKESGIQINELNAGCICCSLVGDFRTALQQVVEQYHPDRIVIEPSGVGKLSDVTRAVEGVAEHLDVQLNSFVTVADVNKVKMYMKNFGEFYDDQISHASCILLSRTQTASEEKIAAAVAMLREKNPTATIVTTAWDHLTGEQILKAMSTKDDFKAELIAMAAKANEEHAHEDEEEEHEHHHHHYDENGVCSCGHHHDHDDDEDEHEHHHHDHDEHDHDDHCCCGHYHDHDDDEDEHEHEHHHHDHDEHDHDHEEHEHHHDHDGHCCCSHHHHDHHADEVFTSWGVETARKFTKAEVEHALTELDTGNYGMILRSKGIVDGGADGWLEFDYVPGEWEVRSRSADVGGKLVVIGSKLNETAIAQLFGCMLLLLYHSAGKNAMRGQNSPQNAVNLQKKLQFFLEKGRFSIDSLVIIEVMSMNTVPERLAALRAAMKANGVDVYLIPVGDPHSSEYLPDHYTSLTYFSGFHGENSNFVVTMTESAVWADGRYFVQAEKEIAGTEIQLMRMGEPGVPTAEEYCGKVLPEGGTLGLCGLTANCALVNNLKKELEPKHGSIKTLFLEDELWVEGRPARPATPAWILPKEYAGFSPAEKLEQLRGKLKEQGCTAQLVGKLDNLAWLLNLRAMDIECTPYAMAYCYVTPNRAVLFIDQARVTPEATAELEANGVTLADYDSILDGMAAETEPQTVLAESATVNYAVYQVLENNPALTVKDAADPLLAMKGVKNEVELAHLRESHLRDAVAMVRFQIELESRLASGEQLTELTVDEILHKYRSADDKFLVESFGTIAAYGGNAAMMHYHATPEDHAVLQRKGFLLVDSGATYLDGTTDITRTYPLGELTEDERLFYTWTLQCHIDIAKAVWLDYCDCHMLDTIAREPLWRHLINYRCGTGHSVSFVGNVHEGPHALNGRNTTLMRPGMIVTDEPGVYEAGEVGIRIENEIECYHKADNQYGTFLAFRPLTFVPIATSPIVPGVLDKEQVAWLNDYHRKVFEQLAPRLTEDERAWLAEKCAAIGCMIFHIAICSPDGALRSRLEHQCMEFFARREDACIVEQLQSPEALLQQDAAGLRYELYLIELAAVARPEGLTAAAELRRRGRRAPLAFVARTPAHAYSAYRVDAMQYLLQPVHQPEVSALLKRAVEPEYGPTLTVTTADGVRALAYAEIEYLECTHHIVHFHLTTGEDVASLSLRVPFSAVAQPLLADGRFVQPHRSYVVNLEAVQLLAPGEVRMRSGARIPIPRGREAAVREAFCARVGMTNPLVSIIVPVYNAQKGLSRCLESICGQTYQELEIIVLNDGSTDDSLAICEQFRAKDPRIVVVDKENEGVSCTRNAGLVLAHGDYIQFADSDDALDPDYTQNLVQAALQHSADLVIAPYWMVIPSNSTKTGYFLETLQTSLGIEPETPKTEVRKYSFLPEGIYSREDYARSLMQQPASFYYGVLWNKLYRREIIAQNQLAFAPDVHWAEDLIFNMGYLEHAEVFVSIPEAGYHYIQNPKSLCHTQIDLRGIVENKTQIFQLFKEVYTRLGLYEELQPQIYKFLFAFSESGVPSDSLQGALLDAMSRLNDASVQPEPSRKKPRRKPQKHARRKKPRHKEEMHCKQWIFDMDGTLTDSMVVVWEGAPEALLARFGRTPKADLHETLLTMGMEDGAQYLIREYALPLDRNGYLDVMREVIAQLYEKVELKPGVRDTLARLRAEGARMCVCSNTWSSQCRTVLTRLGIDEYFDFYIEARGAMSKSSPAPFMEALHRLGGTSPAGCAVCEDALYAAQTAHDAGFYLVGIQDTTSAADAPALRRICDQFLPDWTALDWAQAMERREPTQKALVLAGGGARGSYQVGVWRALMELDWHPQIITGTSVGGLNGAMFVLDLYETARDMWLTIRSRDVMELPKENADLSALHQFLRRVVKEGGMDVTPLEEIVERVLDEDALRAAPIRFGLVTVEQRGLRPRELTLEDIPAGQVRDYLMASAACFPALRARQIDGVKFLDGGYSDNMPTGLAKTMGAEELVCVDLEGVGITRPNLTGLPTTMIRSYWELGDILHFDPDTAKRNMELGYYDTLRAFGRIRGCAYAVDSGADSSADAEAFRAAFDTVQKEVREKYPVTLTADAALLLARMKDAQLAPLEAAAEDAGVDPTHFYTTRTLAEAFLAACDKERMESFAPLFTGSSTAGQAALAALLPNTFLQALVWRTLTAPALPEVTEDEGLMKVYKGVSASPGLVLGQVSRLEHHVETFSHGPFNPERELRLLANAVHTAQNELDSMAERAAPTEQAIFLFQSMMLDDEGMMNEVRFCINAGISASAAMHQVGQRYADQLANMKDNPYMQLRSVDILDATRRVINILTNRPRVWLALDHPVILAADRLMPTDLFSVPSGMILGVITAEGSGQSHAAIIARAMNIPGIVQVGKDFLDDCDGRTVILDATNGNCILDPDAAARQQAEASICQLQREDAEMKQLHSLPDETRDGEPFELLANCFGPEDIDTAMQSGAKGVGLLRSGYMMLPGRILDEQEQYFFYCSCLAAANGCPVTVRTFDFGSDRTVADANQGPQSSKLGLRGIRNSLRQPQQFQTQICALLRAAARGPLRVMFPMVTDVEDWDAAMSIVEHCRQSLRERGVPFNENTQFGVMLSIPAACLTVEDFVAHGCDFLVIGTNDLTQYTHAADRELASAEHYYRPASPAMKKLITMVMDAANAHHVPVTICGLAVGNPANTAQYLHLGLRSFSVSPQNLLKVKRALLDTDAHPDAGENAMPHRYFTTEISNGTATLRGADAHHLARVMRAKPGDTVILCDGNAVEYTATITGFGEDRVDFAVEPGYPSAAEPTVEVTLLAGYPKQDKLEQIIKHGVELGAAHIVPFFSRYCVAAPKKEEQKNERYNRIALEAAKQCGRGVLPNVALPLPNFGAVCRSFDQYDLVLFCYECGGAPLRQLLTEAKPADGQKLRLAIVTGAEGGFAAEEAEMAAKAGAKTVGLGPRILRCETAPLAVLSAVMTLTGNLEMEWTDIRLTVAKADAENAEAVATLIAEGGIYIEDYSDIEQQVAEIAHVDLIEQELLDKPRDTVIIHLYLEPGASQVETLALIAARMEAAGIPYTVETEGVEQEDWQNGWRKYYHPMEIGRRLAVVPSWQQYDTDRVKLILDPGLAFGTGGHETTSLCLEALDEQVRGGERVLDIGTGSGILAIAALKLGAASAEGVDIDPVAVRTAGENAALNGVQDKLTVLVGDLSDKASGTYDIITANIVANAILSLAPAVPGLMAEGATFIASGIIDSRKDEVIAGLEKAGLSVVEVKEKRGWECIVCKKAMLRKAASERDLYRMCTKTFTWRLLTGQELTEVYLNEMRRDFPAGELKPLSMILTSEAEGTAHTWGVFDGDTLAAYLLMVRPEGCRVSQLDYFAVVPAYRAHGIGAQLLAQLPAQEGDAEAILIEAEMPEKAEDAAMAVRRLGFYARCGAWDTHYTEHLFDAWFRILVLDCPGCSSLAPETVVEALADCYRRTISPTQWQKHVQFFAPDGSVCGMSEFSHLKNKLLAEQVEDQIYHYILDEALEPGAKLPNEFALGEKFRVGRSTIREAVKLLSSKGIVEVRQGSGTYVVTTVKGLSDPLNLRSVQDKNALAFDLVNVRLLLEPGIAEMAAQNATPEDIERLRRLCERVETKIHEGDRYIEDDIAFHTCIAESSKNLVVGQLIPVIDTAVMMFVNVTHKKLIDETIMTHRMITEAIANHDPIGAKAAMVMHLNFNRSYIKKVYDGEDPDDGTIGMAAYVNMPERLRTLRHCIFTGGVVKGSGSCSAAFYESAALPERLMELRSQEVRTLAPENDPLKMGMGWKVEDLAKPQIMVESTFGDSHPGSAHLDQFVKEAVQAVNDNGGKAARYFATDMCDGIAQGHDGINYSLPHRDAIVNLVEAQANASVYDGGVFIASCDKSVPAMLMSIGRLKDMSAIVVTGGVMEAHTLPKEYVVSDPACAINELLTLEQIGKFDAWEKTGVIPNSQLDYYKHNACPSCGACSFMGTASTMQIMAEALGLMLPGTALMPATAPELKQAAYDAGKQLMELVKKGITAKDIVTKKSFENAIMVHAAISGSTNATMHLPAIAHEFGIEIDADTFDRMHRGAHYLLNIRPSGDWPAQYFYYAGGVPRVMEEIKSMLHLDVMTVTGKTLGENLEELKKNGFYQHCDAILAEKTAGFARPVSREDIIHSFDNAKGTDGSIAILKGNLAPEGCVIKHTACPKNMFEATLRAKPYDSEEACISAVLHGEVKPGDAIFIRYEGPRGSGMPEMFYTGEAICADPKLASSVALITDGRFSGASRGPVIGHVSPEAAVGGPIALVEQDDLIQIDVHNRKLAIVGVKGEPKTPEEMDAILAERRANWKPKAPKYTKGLLKLYSQHAVSPMKGAYMEMTAVATPDAARLVFAAVAGLILLLILIIKFKVHAMISILIGAVGIGLMAGMPLSDIIGSVNEGIGNTLKGIALLVGLGSMFGAILEESGGAQTLAVTMVRKFGDEKAAWALGITGLVVAMPVFFDAGLIILIPLAFSLAKRTKRSVLYYVIPLLAGLAVGHAFIPPTPGPVLVATMLGVDLGWVILIGIFCGIFAMIAAGPIWGSICGKKYMIEVPEHVAQQADIDESKLPKFGTIVGIIMIPLLLIIANSVAKVVPALAGIQPVLAFLGEPFMALLLATIAAMYLLGTRHGYTNAQLEKIMTKSLEPTGMILLVTACGGVLRYMLQNSGLGDVIGNAVANASLPLVLVAFIVAALVRISVGSATVAMTMAAGIISAMPGLSALSPLYLACVTAAIAGGSTVCSHFNDSGFWLVKSLVGMDEKTTLKTWTIMETLVGGVGFLVALIISFFAMAVINITKENFAQEVLHSEKPVLLDFWASWCGPCRMLSPVVDEVAEERTDVKVGKVNVDEQPDLAAQFGVMSIPTLLVFEQGKLVRQAVGARPKAGVLELLGMAKLDLTKYGITGTTEVVHNPSYEQLFAEETNPELEGYEKGQVSELGAVNVMTGIYTGRSPKDKFIVMDENSKDTVWWTSDEYKNDNHPASQEAWKAVKEIAQKELSNKRLYVVDAFCGANKDTRMAVRFIVEVAWQAHFVTNMFIRPTAEELENFEPDFVVYNASKAKVENYKELGLNSETAVLFNITSKEQVIVNTWYGGEMKKGMFSMMNYFLPLKGIASMHCSANTDKNGENTAIFFGLSGTGKTTLSTDPKRLLIGDDEHGWDDNGVFNFEGGCYAKVINLDKESEPDIYNAIKRNALLENVTLDAEGHIDFADKSVTENTRVSYPINHIQNIVRPVSSAPAAKNVIFLSADAFGVLPPVSILTPEQTQYYFLSGFTAKLAGTERGITEPTPTFSACFGQAFLELHPTKYAEELVKKMKASGAKAYLVNTGWNGTGKRISIKDTRGIIDAILSGAINEAPTKKIPYFDFEVPTALPGVDPAILDPRDTYADAAQWEEKAKDLAGRFVKNFAKYEGNEHGKALVSAGPQLMGKNRHFDKSLTNRDARWDPRPRWGKKTQQTALWCKTEKMMKKIAPILLAMVLALTLCLVGFADAESYDDDPLEETAASTSEEALEEAEPVPARSSECDACGKMSRVTPKKDTFETGPEEVKCIHYPHGTDEVYYQHTTYYQVCGSCGYKSGTWTVDEGESLRYCHGWSATKHMKTIYILLTRSGTLLSKLVYAATGASYTHASMAFDPELSCLYSSTRKNGYTMFPAGPSKEYLNRGVFRLRDNAPCALYALEVSDEAYSHALCRAEEFMRHSEEYSFNTLGLILCGLHIRWQRRRHYFCSQFVSEVLEQSGALALPKDGTLMHPNDYPLLPQLKCLYKGRLADLPQRKAMDLGETPSMVSIYTGLLVELLQRRAQRFFEMQQAQMGTLHLSIQSGNRPESYHPVHRRYADAKAQTYHLEDLYSTLSKTPCGQYYEGKKQVLSEKQQQRLLSGTTIHEVHRLLRTAFQYAVEWGILAKSPVPVDSPKKSIQERAIWGADEMWAALASMEDPILHLAVHLTLVGALREGKVAGLTPEDLDFEGADGTGTFRINKCMQRVQKASLAKTGKGCILQEFEDKREGSTTTLVLKKTKTASSNRTIFMTAVLKEELKHWLKRLEMDEAVEPERYRNSGMLLRLPNGLAVEPILIRKKFIKWQDEHPEFTRIVFHGLRHSSATYQLMISGGDVKAVQGTTGHASANLLVNTYAHIQQDSRKKLGKKFEEGFYKSGTTPVQAAPVEAEPTISVSALLELLKDADPSVKAQLRLALLTMTETVKSLDYTKNILQTIPNNDTMEVVTQTNAVKSPTDSLKATTLVYTVEEIAQMLSISLRSAYNLCNSTTEFRVLRVGGSIRIPKDSFDAWLRAAMFDDLTVCTPLPRYLPFPKFLLDAQLSPSRYRSQKPLIVTTNLPLNEIRYPQDTAHARIYDRILEMCVPISCIGASLRKENAQKKLESMKSLIGMLKLSSLKIDPEFSAQILPLSFDELQQLKMNMIRDGKLTDPIIVWNKTILDGHTRYRILKKHGFIKFEVEEIQLANKYEALAWICKNQLGRRNLSPERKKFLLGKEYESTKLAVGGQPGNCNKVNRCDQNDHIDSEKRTCERIAVEHGVGSATVRRAEKYMNGVEAADEAAPGAREEILNGKIKAADREICAIAKAPKEQRPEIVAELRKPKSERDKQLASSTKSPSVKVESFDDDGSRFLIGISKKVQGHKRALTNSDQKALKKSVEASADHSIHIAAIEGAYDAFIENWELTFREYPDLLTGPENWKQIEKYSDNLQRYLEFIRSRHLKMLEMNLGEIADIRSGLVLSRKQASSDSPQAIRYHQLSLRAVKAEGEIAPAELEPYFAKEPLSIDYLTQPNDIVVRLTAPYTAVLIDDTTRNLVITSNFVVIRIRGTELVPGYLYWYLNTPKAKRQIYQNTTKSMISSVNARYFCRLELQLPSPEIQRQMEALRLLAQQELRLLRKLEAEKRSCYEAMLEQMNYAQRKGMTTKSEIERVLWNACDSFRGKIDSSRYKDYILSMLFVKYLSDVSEEKREQYREQYDGDERRVERAMSRERFKLDDTSTFGYLYKNRHDSEIGLKINTALASIEDHNSSKLRNVFRSIDFNSNVDFGTDIKAKNATLCNLLEDFHGLDLRSSALDGSDIIGDAYEYMIGNFASDAGKKGGEFFTPSKVSELAAALVDPQENDRIYDPTCGSGGLLLKACKRVPDGKVAVYGQELNAQTWALCKMNMFLHEVDDARIWQGDTLSNPQNIENDNLMLFQCIVANPPFSLDKWDSGFLSNAVLDSKGKKPEKMNASLDPWGRFDWGVPPSSKGDYAFVLHMLNSLDRSHGRMAVVLPHGVLFRGASEGKIRRQIVEHNLLDAVIGLPANLFYGTGIPACILVFRKDRISRGVDNVLFIDASAEGNFEKGKNQNLLRDTDIQKIVDAYKKRETTPKYSYRATLDEIRENDYNLNIPRYVDTFEEEAPVDIQAVKKNIADIEAELAQVQEQMKKYLDELGLMRQCTIYDTKILKYCCLNCTLAYDILSYGRKARIWLMKAYRLQEVTRRRKEKWEHMGALTDFLGAGEVATALGGVVTALLDKLEHAVGWCANHDTPSRTAVNTYIEEIQNSDKDPLVKAALISNSKKIIKEYCNQEDIVAIAIQSVKSDAKPENIDDDWLAQFMDKARLVSKKEFQLIWGKILANECNHPGCIPRVLLEILSRMDTLDAEVFSFLCSTTIALEDDCAPVIIYDKLEDYNFPKMTFDQLLDLEALGLISTDFVGFPGGFYMSASKENSRVCYFEKFKSVEKDEKVPVGNIIYTKAGKALYNSIQSERISNFWEDLILPYWNSMKDIIESQTEMKMKVVAIKSIADVSSGNTPSRRKSEYWNGSIPWITTGELESGYVTASKECVTEKALKETALKLYHKGTVLIAMYGQGKTRGTAAVLGIEATVNQACAALTVHSGCSKFLFYQLQNSYHAIRRLSNTGNQENLNAEIIKNFKIPWPDELEQQKIAAILSTQDKVIELKEKLLAQKQQQKKYLMQQLLTGKKRLPGFCEKWTRKQLGELFENRVEINRSDLGLLAITSTRGILPRDCLDLKDNSSEDKSKYLRICPGDIGYNTMRMWQSVSAYSEYEGIVSPAYTILAPMEGVYSRYFAYLFKTQSVIFSFYRFSQGLVDDTRNLKYENFKKISVSIPSKVAEQRAIVQILSTADHEIDLLQKSIEAEKQKKKALMQLLLTGKVSVRIMTLEEKTYKELCKQIVDRTNRPLTETQKEIIKATIDQARNPIELMSSIEALLIVWRCMQGILEFVKQHFDTIITVSITILGFIVTYFMNKKSVQDELKKDKVMHTTELMETLPYDVCQFMNELFHNKSRTITKQSIDVHEKILSKIIAYGSVDAVKLAIVVQECAYEKERQSSQAGVDDGTRLMAAYALLITQLKFDLTSEVIPATSWFRIKIKDYEKIRIKTEAAINALVDELGLNSKFKIMNLDKSIYSEANISKKPALELLQAMGYTYLSPEECRQQRGSGYRVLLRDVLRGQLRKLNRYTYGGVENEFSAVNIEHAMDDLEIPLTDGLVRTSEKIYDALMLGKSYPETVGEGRLLNFNLKYIDWEDPTQNLYHVTEEFAVESTDGQHDARPDIVLFVNGIPFAVIECKAPDIPVEQAIEQTCRNQQPHYIPQLYAFAQIVMATNKNEVRYATTGTPKKFWSIWKEQDADFLNREMARLTPVRTPTVQDKDIVSLFTPVRLLELTKYFVLFDYNVKKICRYQQYFAVNEILHTVKQRDEKGNRRGGVIWHTQGSGKSLTMVMVAKYLLLELQADHPRVVIVTDRKELDKQITATFAHTRLRPARATNGRHLLGLVTDERVDIVTSIINKFSTAERLDGCNKSRDIFVLVDESHRSNYGKMSHKMRTVFPNACYIGFTGTPLMKSEKNTLKKFGGLIHKYTIQDGVADGAIVPLIYEGRFVEQKVDEKNIDLWFQQTTKRLTESQRDDLARKWSSIRRLTSTNARIKRIALDINEDFCRTYKNTGFKGMVATNYKRDAVRYLECFEQFGDLNCAVVISAPDLRESVDDADEGADDKVVAYWNRMMQRYGSADDYEEAIKAQYHAGELDLVIVCSKWLTGFDEPLCQVLYLDKELKEHGLLQAIARTNRLCEGKSYGMIVDYRGLIKKLDEAMELYSGAGLENFDGHDLKGVVVDVLSAIGTVRSDYSALMELLSAVPGLTLAGTDAEAVEVFLADSSKREEFYKRLCNFGRSLNLVLNSEKTYEALAVEEREKYIKAFGFFSAVRRSVKPRYGDSIDNREYEPLMQNLLDVHLSVEGLKRITEPVDILDRDAFEKELNELGSLRAKADAIRTRLAKSINTKYQENPAYYENFSKRIKEALELYKARTITEAEYLAKMRDILEDYRTGKSAIAYPDRIRANVHAQAFYGVLTAIFSNEKLSVEPDFAAEMALDITTIIEKHSQVDWTHNLTIHDRISQDIDDLFYRYQKEKGLVLSFDVIDMIIENVKTVALRRFAMIQICAVETEHGCICYQLERKNVRNINLRIRTDASVYVSAPKDVSESVVTQFVKRHSRYIAEAQQHFREFQQYAPQPRHYISGESFSVLGRSLRLRVEQGKKDDIRSDGVYLYLTVKDTEDQEQKKRLVDRYLNKMCREIFQQTADQLYPIFRKYDVPFPRIHIRSMDTRWGSCLPQKAIITLNRHLLEMPVSCIEYVVLHEFCHFLYPNHSKDFYAILSTLMPDWQQRKKLLDKNAQFEWSQKYETFCGGESMAFKSINHDDEKIFYNRLWKLMEERNLSTARELAQALYAEEIVPVDSASEDEISIIGSMTRRIQEHLNLEGTDKLQGRYVKAYCDFFGCSADYLFGLSSIKSENPDVIRFCEATGLSEKSVRRLIEDLPEDIKRDLVGFWSNVLESNLFYEVPLEFHQMCYELGQYRIAQDRIKAINMAAKKMDNSDTFVDTWRAMMESNYLKEAQPHEGSYHMHLNELLVNVTACLENWVDEYVPTHKKEIQQYFYGDLNKRLQESYDEFLKTTQSEMNKQNTMQPLGETKSLQNIVIDEVCQKISDAVIDAEATSEEKYITKQKLIVSADDMNTQEQLDAMDRNYDRRNQERWQNVLYFAVVSFSVVGIAIGSPIAIKNVHRLLSAAMYEFDVENSMFRPIDGFVQNSYNIIDIIIIQIILSKRMDFIGRTSELATLNAELERGSGFVVIYGRRRVGKTTLIKEFIKDKRAFYFLATTESEAQSMKRFAGVLSRTTKNPMLSKVTFTDWLDLFQVVADDHPDEKKVLVIDEFPYLVKTSPDFPSILQNAWDEVLKDHNVMLILCGSLISMMKKHALAYDSPLYGRRTAQIRLMPLQFTDVYAAQNLSFEQAVEQYAITGGVPKYMEFFQTDEPLVEQIRRVVLSKNGFLYEEPDFLLNEEVQTPINYFSVLKAISDGNHKLNKIGMTMEQDTSAITPYLKTLIDLGFVIKNVPITEKNPERSRKSLYYVSDNFIRFWFRYVYPFKGELELDNQQIVLDEMGKDFKQKFVAFAYESICRNIFAELCRKGQIEFAPSRIGSYWRNDNEGDTEIDVAAVDHQHKRLFLGECKYHAKPVDVAVYSALQEKGQSKELTAAFKGYEIVYGLFSKSGFTDRLVEMAAENSNLILIQEDAVYKKMPAHRAVLESENSSKADNARKNTAFPPVCKNSALTLGQMKNDDFMAAQSTTPLLKVEGLKQYFRVNKNFTVKAVDDVSFEIYPGETYGLVGESGSGKSTIGRSIIRLYDPTAGKITFDGQDISGRLTHAQNNTLRTQMQMIFQDPMASLNPRKKVEDIIGEGLDIHHLYKTQAERREKVEKILAKVGLAPEHAERYPHQFSGGQRQRVGIARALIMNPKLIIADECISALDVSIQAQVVNLMKDIQQETGTAYLFIAHDLSMVKYISDRIGVLHLGHLLETGTTEEIFEHPIHPYTRSLLSAIPLPNPVVEKRRVAETYDYATSGIDYSKGTSHHVEGSHYVKCTDEEFAKWCKMPEAKKEQVLSVRDLDITFKTTAGPVHAIRGVNINLYKGETVALVGESGSGKSVTMKAAMGILAKNATVNSGSIRFSYHHADGSPESVDLLQKDKKWIRRHINGKRIAMVFQDPMTSLDPTMTIGKQIMEGMLWHFKMPKAEAYKKALELLEEVGITDAEKRMKNYPHQLSGGMRQRVVIAIALSCDPDLLICDEPTTALDVTIQAKILELIRRIQKERGISVIYITHDLGVVAKVADYVDVMYAGKIVETGTIDEIFYDPKHPYTWGLLSAMPDLDTADDRLYTIPGSPPNLLHEKPGDAFAPRNRFALNIDDEIDPPMFKISDTHYAATWLLDPRAPKVEMPPELKERIARMKAEAKKIEEAEMAEKAIRLGGESTADAIVSAVDAMYTEHTFAEKDFALKHNEDEISVDTNFAAQNFWKEALIRFFNKKSAVLGLVLIVIIVLLAVLGPGMNSYTYSGQDLSQKNFAPRVPGIEQFGVLDGSEKMSTTTGTKVTNAYQEKDKLDVYYWFGSDLYGRDIWTRTWEGARVSLIIAVAAAIIDMVIGMSYGLISGYFGGRVDMVMQRFLEVANGIPRLVIVTLLLLVLQPGMVTIIFALMLTEWVGMSRIARAEMLKLKDQEFVLASRTLGAGSFFIIFKEVLPNIIGPIITQVMFSIPTAIFTEAFLSFVGLGIPVPQCSLGSLISELYNSFTTHPYQIIPPIVVMSLLMLSFNLVADGLREALDPKMKSMMKKYTLKRILTSLFTLLAILLVLFILMQLMPGSPFNDEKLTPDMRAALYAKYGLDQPIYIQFFRYVGNMLRGDLGVSYNISKNTPISQLIQSRLPISIQVGGMAVTLGAIAGLVLGILAALKRDTVVNSIATIISVIGVSVPSYVFALALSYTFGFKFRWFPMLFSAKDIFGSSVLPSISLSMFTMASIARFTRSEMIEVLDSDYMLLAESKGISGPALIFRHALRNALIPIITVLAPLIVDLMTGSLVVEKIFAIPGVGSLLVTAIQSNDYNVVIGLSFIYSAMYIGIMLVVDLLYGIIDPRIRLAKGDDMGFFGRYVRQTAEMNAQRGTLNIMLETEVQSLDPQVATDGTSFEVIADYTDGLMQMDADGAAVPAIAETYDISEDGKTYTFHLRDAKWSNGEAVTAADFVFGWQRAVDPATASEYSYMLSDIGQVVNAAEIIAGEKPVTDLGVTAVDDKTLEVQLNVPVSYFLSLMYFPTFYPVNEAFYNTCKDTFGTSPDTVLSNGAFKLTDYQPAATAFTLEKNPDYYDAGKIALDGLAYQVIKDSQQALMSYQTGALDMTLLNGEQVDQVKDDPEFTSVGAGYLWYISPNIGSVPELANENLRKAITFALDRDAITGDVLKDGSAPCYTVVPPQFATGPDGSDFSADQTKFAEFCAYDADKAKEYYEQAKTELGKDSFTFNMVVDADDAPQKVAQVVKEQLETTLAGFTLNLTVEPKKQRVQDMQDGNFEIGLTRWGPDYADPMTYLGMGVTGNSNNYGLWSDADYDAIIDECTTGDLCTDPEGRWAALYEAEQIVLEQAVIFPLYGQCNAEMVSSAVTGVAFHPVALNRVYKNAAKSEMADVKKIATRDSYGNTLKELAAEGHDDLVVLDADLAAATKTGMFQKAYPDRHFDCGIAEGNMVGVAAGLATMGYVPFVSSFAMFAAGRAFEQVRNSVGYPHLNVKIGATHGGISVGEDGASHQCCEDFALMRSIPGMTVICPADDIEARAAVRAAYAMEGPVYLRFGRLAVPVFHDEANYHFELGKGEQLTEGNDIAIIATGLMVNEARMAAEQLAAEGIHARVINIHTIKPLDEEIVLKAAKECGKVITAEEHNVIGGLGEAVCAVLSEKLPTPVRRVGVQDVFGCSGPAWDLLKKFGLDAATICKTAHEMLGKMTNAEKLTLKKHACHIRMGVIEGTHSAGCGHPGGSLSIADVLSYLYFKELNIDPAQPRMADRDRLVLSKGHAAPALYAALAERGFFPVEELKTLRKIGSRLQGHPNMNSVPGVDMSTGSLGQGISAACGMALGAKHAGSAVNVYAILGDGEVEEGECWEAFMFAAHYGLSNLCVMLDRNHLQIDGTTETVMNSAPLEDKLRAFNFNVVTINGHDFDQIESAVQAFHAETEKPTCIILDTVKGTGVSYMTNSVAWHGKGPNDEEYQVAMNELNAAYAALEQEENMNLRIHALKKASRQRPGVKIAAARFFSILYYPFCAKRSSFFQQNVQPRGNFFANRPIFVYFADVPPRLTGANWFVILLTIVPAGSRTRAGSSLPLIPASNIFLKQTPRRGLPLAWNAGAGSFLFCGMKTKNASPVRQLVPAALFLALAFVLPLLTGQVPKVGNMLCPMHFPVLLCGFVLGGPWGLAVGFAAPLLRSVLFGMPPMFPVAISMAFELATYGLVSGLLWRRAKHSLPALYAVLLTAMVSGRIVWGIVRFVLAGLTGGSFPFSAFLSGALFTAVPGIVAQLVLIPLLLTALQKAGFADMKIIRTKDYADMSRKAANIISAQVIMKPDCVLGLATGGTPVGTYEKLVERYNEGDLDFSEVTSVNLDEYRGLPKEHPESYWSFMHRNLFDHVNIDPAHINLPDGTNMDAEAECKRYDEVIRSVGGVDLQLLGIGHDGHIGFNEPHDAFDLGTHCVDLAQETIEANKRFFDGNEDLVPKQAYTMGIRTIMQARKVLMVVNGAGKAEIVKKAFFGPVTPEVPASILQLHPDFILVGDEEALSLIMDIRQLHYFLTLCEEMNYTRAAQRLFLSRQALRQSISALEAEMCGPLFISAHHKLALTDRGMSLQRHAAPVVEQFQQMQAALRAEIQSAQPVRIGISVALVPDYLPGLETQLDKFRQQYPHVEMRFRLLDNDAVADGVEQGELDAGLVIDLGCAAPVLARTTLRADPACLLVPRGHPFWEKERIPLAELRGQRVLLPSLRQDLFSPLWAACARAGFAPNAEIGPSFYQAYYLVQEQLCTCLTRYEPGARRELDRVRDVLLEDMPPLCVSLVQRRDTSSAYIDLLRSYLLEVLGSTASLPPRRGRPAKPFYTAPVLSSAAAKAAPEHPVPGTQLPFAGGNNFRELGGYRADEGKTVKWGQIYRGFPTGRLTTEADRARLDGLGLRLILDLRSSAEAAKLPDYVPDGARLVQICGLRDATGQEIDFSPNDIQRLVQSAPAGMSLTQLMYRQMLTGNKAFKELFRALEAGETPILFHCTAGKDRTGVAAMLILLALGASDETICADYARTNLCRAAEIEKAMADHAAEIAADPAQRMRWQTSAGVDPETAPFVLRTIRQDYGSAESYLEAEYGLTPARLMRLRRMYLEMQRQTAAAALVSCGNSRAAGEAFIRKIDFHGKSRFPLEKEPVVRYTEYNESYKKEMAAKTPAQWKTLFENVPFHRENYYTGPLGPDYTPGGTCLRLWAPTAEAVTVTLYHKGDGGAVLGTKPLVRGAQGVWSIWLPGEQHGRYYTFAVTVDGITRETGDPYARAAGVNGVRSMIVDLARTAPSGWERDVRPNIPPAQRAVWEVSVRDFSQDAASGVRPAWRGKYMAFTQQGTTLHGDGIHPTCLNYLKRLGVKYVQLMPIFDFGSVDEAKPLLRQYNWGYDPTNFNVPEGSYSTDPTRGEVRIRECREMIAALHAAGIGVVMDVVYNHTYRTENPLNSTVPYYFFRQNPDGSFSNGSGCGNEFASERPMARRYLIDSILYWAKEYHIDGFRFDLMGLYDAESINAVRAALDALPGGRGILLYGEPWQGGASQLHRYEANKANLAMLNERVGIFCDDTRDAIKGGCFDAREPGYVEGKPGSFWDIGAAVAAWCRSDRLPPHAPSQIVSYVSAHDNFTLWDKLLCVRYEKPEFTARDTVALAQNRLAAGIYLTSFGLPFMQAGEEFARTKKGVGNSYRSSPALNRLDWNRAEQYHALVDYYRGLLALRAAFPRLGSTDRHAPEALQFFALEQPLVGWTLPAVWGDGAAWSALCVFYNPTDTTCTVALPAGQWKLLSDGTSSSLWRGQSRVFTGNAPLAPYSATIFGAVMNSEKEQEKQKLCRRYCRELRRALACVPELRERTLAQLTESIEEYLDEHPTADYQELVRVFGTPAQAAENVLNEMDAKQVQQLLKKYQWRRVLAIVLAGVLIACAVLWFAYGLFFWFQELIHPSYYVIEPAIETSGSLPPTMAKMGVSENLKRGVTEIVLLALLSQQDMYGYEMAQAMRERSHEKFTLLETSMYPTLYRLQDNGYISAREELVGKRRKRTYYHLEPAGRAYFQKIFAEYMTVQQGVQEILTSCQKEVTDIEQMKRVFAALNIQIFVCLLVSFMLLLCGCNRSETSSDAPASSAPETVQTTQAPVKKSKALTPQEELEKLAPVPQTAQCPICGGTNLQVTLASAAIQKGDRNAQKCIHYLEGEDYIYPLSLRVYDACLSCTDAENPWHGEEYDILIGSSTICHGYQMRNSMLKQVVGALLCTAVLLASFSVYAFAAKEPQNTNHSSATVSFGVQTAQFIESRTETTADGTQRRYGTLAFSFEVENASFEAHLPIILKKLPDGSTQYETATDWFSVQAKPNRNAALPAAQQEAVPKWYVEQAQCAVYESTTDPARLILTVQGVLQDENWDCVPFIGSSEYYFMENENKWEYDYSASNNETGYPNVGSSGMNTANQYNEPEAQPARPADTAPADGGSVPPTPPEQPQYSAPAQPEKPRRKKKFNGGKLARSAVALVLAAAMGFAGGFVGAKYGGGSKVVIQQVERPASSDSSTDSTGNSISATSGTGLSTAQVAEMVSPSVVVITTEQVVYSQWSWYGQSQVESGAGSGVIISSDGYILTCAHVVSGASNITVSIGDKDYPATLVGEDTTSDIAVVKVDATGLTPATVGDSDNLKVGESVMAVGNPLGELGGTVTSGIVSALNRSVSIQGSSSVNTMSLIQMDASVSPGNSGGGLFNMNGELVGIVNAKSSDSDAEGLGFAIPVNDAVKVAQELLENGYVTGRPYLGISYYAVTDAQTAAQLGVNAYGVYIVEVVKGGPADKAGLQAGDRIVSVDGSEVATQSDLGTLMQDHKAGDTIEITVARGGQMQTVNVTLGEKGAENSMELRRTEQGFALYKEKDCIGECRLSPAPKGAQLAALCILPRWRRKGYGSYLLKEVLRSFGGYDREAATVFTAPLPENAAELAFWGKFGFAAEGGQLVRRRTPDLTAVKFVQDFLAARLVHPQLCVDATCGNGGDTAFLCNLTAPAGRVLAFDVQPEAIRSTRTRLEQANVPADRYSLVCGSHADLLQYVQPGTADAVMFNFGWLPGADHAVFSTAQSSIPALQAALQAVRPGGIVSAILYSGAVIGSDEKQAVLRFLRALPLKSFTVLVCDFANWAETAPLPCLILKKMTNREEIERRRTFAIISHPDAGKTTLTEKLLLYGGAINQAGSVKGKQSAKHAVSDWMDIEKQRGISVTSSVLQFNYAGKCVNILDTPGHQDFSEDTYRTLMAADSAVMVIDAAKGVEAQTIKLFKVCTLRHIPIFTFINKMDREARDPFELMENIEEILGIKTYPMNWPIGCGKEFKGVFDRNARKVLAFSSDGRANGVKKVSETEAELGDPALDELLTPYLHQQLVDEIELLDGAAEEFDLDKVLRGELSPVFFGSALTNFGVEPFLENFLRLTSAPLARVDSLTGEPVDPCRDEFSAFIFKIQANMNKAHRDRIAFMRICSGKFERGMEAYHVQEGKNIKLATGTQLMAQDRAIVDEAYAGDIIGLFDPGIFSIGDTLCTGKKKVQFAGIPTFSPEHFARIEQKDTMKRKQFVKGMEQIAQEGAIQIFREVGGGMEEVVVGVVGVLQLEVLEYRLNTEYNVEIRMQQLPFEQLRWVQNDPDTYNLRDLDLTSDTKAVEDMKGNRLLLFTSDWAVRWAETHNESLQLSEFGNIMQNINIGKSGIAVPFLGMGTWAIGGGAWWGDNDDALSVKAIQTAVEQGIQWIDTAPIYGLYHSEEVVGEAMKHIDRDKVVLSTKCGLEWRHESPILHKVVDGVQVYRDLSAKSIIEDVEDSLRRLHTDHLDVLYTHWQSPDFGVYPLEETMEAMMKLKEQGKIRAIGASNVTSDIIRGYCKYGQLDVIQEKYSLLTRRIEKQLLPTCKELGVSVQAYSPLEQGLLTGKVTMDTTYPEGSTRNTNPCFQPTRRAQALELLAKWSDLTEKYDCTMAQLVIAMTARMIPGLHVLCGARKPEQVLDNAGALHIKLDGADAVRMKWDVDAISMAEASPHARCLACAFPFWEQLTPEEQERLCRFTRPVHYAKGARVHSPLESCVGILLLRSGQLRSYLLSEDGRDVTLYRLFGGEVCILSASCVMDAVNIDLYIDAEEDTEALCISAGIFRQLMQENVYVRCYAYQMTAERFSDTMWTMQQILFMSADRRLAIFLTDELAKTGGADLRMTHDQMAKYMGSAREVVSRMLKYFAQEGWVRLYRGGVQVLDKKKLQALARGEMSNIVIVGSGPAGVSAALYAVRAGVQTTVLTKGSGALARAEKIENYYGFAQPVSGQELERRSIENARRLGVQFVQTEAVGLTWTDRLTVETLAGAYPADAVILATGASRAVPRIPGLTGLEGHGVSWCAACDAFFYRGKDVAVLGSGEYALHEVQALLPVVKSVTLLTNGAALTADFPPEVSVCTQKVEAILGEQAVTGVQLAGGAVREVSGVFVALGVAGSTALARKLGAAVEGSRIVVDDKMQTTVPGLYAAGDCTGGLLQVAKAVYEGALAGTEAAKALRKGMSKQRLLFITTGGTIASVRTQQGLKPVLSSEELLAHLPELKELCCPETLALCSIDSTDLGQEHWLMMARAIQENYALYDGFIICHGTDTLAYSAAALSYLIQNADKPIILTGAQQPISNEITDAKKNLRDSVVCAIDPGSRGVMVVFGGHVIAGTRAKKNKTISYDAFASVNFPELALVQGDRLVRYIPSPWPTGPVEFSRTLDSRVFLLKLTPGMSPALIPEIFHLYDCVIVESFGVGGIPQQLMDAFAAGLGDYETTHKVLIMTTQVTYEGSDVGVYEVGKRVRNRFRFLEAHDMTIEAVVTKSMWLLAQNCESFDQLQQRFYRQVNFDTFYHMSEERKTKTDAAAPASAALGRIDRKDAFLQALHTFLTAHQGTEWAVAAVDIQHFKLYNELYGTEKGDALLETVANCLLGYSRQTGYPVGYFGNDDFFLCLPDEKAEQTAVLATLQACMAAGRQDVTFFMVMGVCPVQANPGADAATLCNYAQIAGVTTDSGYLHRFEPTMLNELKEQQQLLGELERALDNHEFCFFLQPKCNSITRAIVGMEALVRWNHPTRGCVPPAEFMPLLERTGLVTRLDQYIWESVCQTLQKWQESGSNLVPVSVNVSVQDILNLDVPQIFADLVEKYKLEPKLLLAEITETMVAEDTQMVESAIQGLHRKGFAVMMDDFGSGYSSLNMLKDTNVDAIKLDMKLIDMNQENRSKGVQIVESVVDMAHRLNLPIIAEGVETPEQVSMLQAADCLYSQGYYFFKPMPVENAEKLLADPTNQDYWDLRRDLMRRDRRVENPGTEKTALALQAYQIFTDNVLVIALLNLATGAYRVIKRDARLLGADLEKEEDFVNYCDRLVNEKIVHEEDADLFLEQTDLEALRSVLYHATAPEFYRYRENVSGQYIWVTTEVLPCRGCCAQNPWATVLVRNDAQADQLSEELDFSYSHDTLTGLANRSRYEADLRELPNSGYESVVCTYIDVVGMHEVNEHLGHRSGDTLLCCLANAARKFFATSRVYRIGSDEFVILTPNEPPYSVWSTADRMRAFLKEKDYVISVGIQQTADLRHLDEAVAKAEAAMRQDRQAYYDHNGRARQLEGLNEKMERTLQEKRDAEHFLKVLAPKYKTVIVVDLQEDTVRPVIVPDDFQSVLDTCGGSFRAALTNYRDKLVAPEDRENFAKLFDFGLVRSTVFSSNLLEHRYRKTDGRSFCIRVTPYSRSGSHINEVLWIFADEEVEMVSFLTDTVVCGFSLYHILAYFLIYSCIGWCLEVIYAAATTGQLVNRGFLNGPVCPIYGFGMIIVLFALTPLQHSILLLYIGGVILPSALELAGGWALYKIYHTRWWDYSDFPFNIGGYICLEFCLLWGVGTLVVMRIVHPVVADLVDLIPPFVGVILMCFLYAVYAVDVVATAIAASALADTLDTMEQLGDSIHAVSDAMTQLLGTTTLNADKKLDEGRLQFKLAAAEARDAAGKRPSARETMAAIRAKAAEATEAARRASEDARLNAAEAANAARLAAKGTAERAAELLQLEQLAAELQARSEEMQAQLLRTPRIVGPRRMLRAYPKLRHGSKLRSLPTLREMLHRAEQENKDDNKNTKMSDPCELCLNNVQDECGSYYCAQGAALDEDEMARYLAHNTAACPFFEPGDEYKIVSKQNMRMRFKPYAHDELMAADFHVHEPLIWGGKWHGQYARPEQPFILELGCGKGGFISQLACAHPENNYLGIDITDKVLILAKRKIEAAYQAAGRPIDNVKIMSTDIERIKGVITPEDEVSRIYINFCNPWSKNDSSHKHRLTYPRQLIAYREFLKDGGEIYFKTDDDDLFRDSVEYFPASGYDIEWITYDLHENEPEWNIRTEHEGMFTEMGIKIKALIARKKPGADSVTWVDPKVLKRMAREAAAAEAATQEGEGNVMQRTEKYFEQDAFRTECESVILAAEPDEKTGGGRIALDGTVFYPEGGGQPADRGTLTLPDGTVLRVSDVHEQAGVIWHTVDALPAAAAPGAAVAGCIDWDWRFDKMQQHTGEHILSGILHQMFGAENVGFHVGTEVVRMDTSVPISPEGLRQAELAANRIVWQDVPVLISYPTREELAALVYRSKKEIEGQVRIVTIPGADVCACCGTHTRTTGQVGQIKILASENYKGGVRLSVVCGARALAAAQAMRARQAEIGALLSAKADQTAVAVHRVYDEYTALKFTHFGLCSQLFDALAQLTAPDADAIRTLPGLDPDGLHRLAVRLTEATTGLCAALTPTEKGTGYCLARRDGDVRALTKALNAALNGRGGGKPGICQGSCAATPEQVERFLKENNKLMRESGILMPVSSLPGPYGIGCFGKAAFQFVDFLSAAGQTIWQLLPLSPTGYGDSPYQSCSAFAGNPYFVDLEALEKEGLLTAADLKAESWGKNPLEVDYGTLYVSRFAVLRKAYAAWRSQCAGLHGCTYYYPDDYYAFTLANEDWLDDYALYMALKIANKMKNWVEWDAPYRRRDKAALAAFAAANEEEIGFWKFVQYKFSVQWQAVKTYANEKGVQILGDIPIYVSADSVDAWVGGKLFELDADGRFARVAGCPPDYFSADGQLWGNPLYDWAYHKKTGYAWWIQRVRHALGIYDLLRIDHFRGFDTYWAIPATSTTARTGKWENGPGMELFDALEAALGKLPIIAEDLGELFPSVRKLLADSTFPGMKVLQFAFGGGDNEYLPHNHVKNGVVYPGTHDNTTLTDWWENGASEKEKATAAAYLHLTPCKPTAKEVAAVKTAAARTALLRAALGSVADRAIIPMYDWLGLGAEAHLNTPGKLGGNWAWRAKAGFDSKTLAAQIKAECAVYCRCNADVQNVKELAIMMGKLQMDREWTEQDLRTFAEGAQAAFETVLLDELPQDTGWQDEGLQVSYSLCNGRVSCVLHRTVRADGKLWRITMSAPLAGNLLPEERMSARERELCREDLNHDFLSGVYNRRYLETVIAAELDRWAEQGRKAAVALVSLDHGAQLRDTYGQPVMDQLICFVANQWKKYFDIPGSQIVCRLTGTTFVVGCLDLDGGQLAEQMRNIYAEMPHECITSMGMMKRVPFTLSVAVAGLDELDSAANCWQRLYAICDERLRGIQISGGNKICMENQKNDNLNLLEAVVQNTEMGKNTLEQILPMTNDVQFKAELLRQRNIYHQLNQEAHTAIEACGGSAQGQSTMAKLNTKMGIGLKTLTDKSTRNLAEMLTQGSGMGVVDCVKSCKDYPNAAPGAKRLAQRLQDFEEDNRIQLERFLMNKPVLVVMAAGMGSRYGGMKQIDPVGPNGQVIMDYSLYDARRAGFETVIFVIKHEIEDAFKAAIGDRVAKAMKVKYAFQQLEELPAGFAVPEGRVKPWGTCHAVLAAKPLIDGPFAVINADDYYGPEAFQVMYDYLSTHADDDFYRYCMVSYLLKNTLSENGSVARGVCIKNEDGTLQSVTERTRIEPCDGGAHYTEDGGESWVDLPGDTPVSMNLWGFGKSFLDEAEQRFAGWLTENLPVNPLKCEYFLPLVVTELIEENKAKIQVLRSTDKWFGVTYREDKPLVVEAIARKTAEGQYPEKLWEMFRGAVRADMARILDIYAHAREFMAKNGNPTQWGDNYPSPELLEEDIDTNRLFVYMVNGQMQAVFAFILGEDPTYKVIEDGQWLNDTLPYGTLHRLASAGESKGIGKAVVEWCLEHCESLRADTHADNKVMQHLLESEGFTRCGIIHVEDGTPRIAYQRLSLTQSQLGMMAKLERSPQQARMEAVSRDALVQAALQEITQNYREASLSNVARAYGVSLAYVSECVRAQTGRTYKELLQKHRMETAARLLRRSDLNIQQIIAQVGYENTSYFYRLFHERYGLSPREYRLVRTGAAPRRPTAMKACSDTHSALLGTCFPYFLLEKAVCRLAGSLFLWESSLYNENMSIRKQYDSDLEALKTALVEMGQNAAEAVENALEALCTADTVAAQKIVQGDDRINNMERDIEHRCMTLLLRQQPVAGDLRHISTAMKVVTDIERMGDHASDIAEIIPHLVTVRKERDPAVSQAIAMGRKAYQMILDAMDALTAEDEIAARRVIAADDAVDYDFNAIKHTLAQEIAADPAKVDAALDLLMVIKYLERIGDHAVNVAEWVQFVRTGRYKDESMFMENTNVPVISAKDLNLWYGDFKALKSISLDVGEREITALIGPSGCGKSTFLKTLNRMNDLVPGVRIEGDVRLKGEDIFAREMELTDLRRRVGMVFQKANPFPMSIYDNITYGPKLHGVRNKAELDELVETSLRGAALWDEVKDRLKKSALGLSGGQQQRLCIARALAVKPEVLLMDEPTSALDPGSTMKVEELMNELKKNYTVVIVTHNMQQAARISDRTAFFLLGELVEVGPTNQIFSTPRDKRTEDYISGRFGMNNGFSSSRRAWNRVMTVLVWASAVLVMILVAGIIGMVLVRGIPHISWNFLSTTASVLKKTDGILPAILNTLYVIVLTLLIVLPLGVGAAVYLTEYASNRRLIEVIEFTNETLAGIPSIIYGLVGMLVFSQALGFQTCLLSGSLTLVVMNLPTIIRTTQESLKTVPQGYREGAMGLGAGKWHIIRTIVLPCSIDGIVTGCILAVGRIVGESAALLFTAGAAEVIAKSVFKAYTSNGATLSVLLYLRAFEDGDFTSAWGIGAVLLVLVLLINLAARLAKTKLKQKQMKNTTSSLRRVRLPRTPADWLEAVMNFIFFLCGMLAVCCVVLISVYMVVSGVPAIHKIGIFKFLFGTKWASTAAEPLFGILPFILSSVYGTLGATIIGVPIGLLTAVFLSKAADPKLRTVVVTAIELLSGIPSVVFGLLGMQVLVPAVAKTFGKASGACLLSAIVVLSIMILPSIVSVSVTALNAVPPEYEQGSLALGATDTETWFKISIPAAKSGIAAGVVLGIGRAIGEAMAVMMVAGNSPNMPDSLFRSVTLLTTAIAKEMSYAGGLQRQALFSIALVLFVFIMLINVVLNVVLKGGNRDEMKKISRRSFLTVCGAAAAAAALTACGGSASSASSTAASASTTASSAAESAAGTLSGNVATGGSTSMKNVIAALTEGFAEVEPGVTVSYDPTGSGAGITGATDKTLDIGLSSRALKDDEKNDVDGTVVALDGIAIIVNKDSKVADLTVEQLKKMFTGEITNWKDVGGDDGEIVLVGREAGSGTRDGFESIVDVKDSCKYAQELTATGAVISAVEANPLAIGYASLSAVGDTVAMVTVEGVECSEDTVKDGSYKIQRPFVFVTNKSVALSEQAQAFVDFATSKDAADLIRTAGAVPVNEMIDRRTFLKLSAGALVLTAAGALTGCGDTVIEKTSGVAKIGDVTFICAMPFPGGGLGDGIVKQLTYLTQFTIQNNSAERVVIKPEDITCIFREADTKETLYFKRKELVAEPGQTAVYNGSQEFYLETKEGVPEKNSTGTYELRVRYNGQTAVFLYGNNGKNVTGRVEMAMKIDRRAFLKTSAAMAVAVSMTGLLGGCSDSDGGTDLGGFTVDVGKWSAVPHDQGIGTGKSWYADFAVTVRVHNLDDSNGFSFPAKSVFVLKIDGQKVALQGGDLLSNITLVMKKGERKTGILTFRLDESQKNLYQAMEAQTADIKLRVGVDPTETYTGVYEGYTFKKDSKLAMKKVILTGDRPTGRLHVGHYVGSLKERVRLQNTGEYDEIFIMIADAQALTDNADNPEKVRQNILQVALDYLACGLDPNKVHIFIQSMVPQLTELSFYYQNLVTVSRLQRNPTVKSEIQMRNFEASIPVGFFCYPISQAADITAFKATTVPAGEDQKPMIEQCCEIVHKFNSVYGETLVEPQIVLPQNAACLRLPGIDGKAKMSKSLGNCIYLSEEPEDIEKKVKSMFTDPNHLRVQDPGKVEGNPVFIYLDAFCRPEHFAEFWPEYQNLDEVKAHYQRGGLGDMKVKKFLNSVMQAELEPIRTRRKEWEQRLPEVVEILKEGSAYAEKTAAATLDEVRKAMRIDYFENDNLLKMQKTIWITGASSGIGREFARRYAAMGCRLILTARRADRLQALAKELHAAHGTECRIETADLSRAEECSRLCEVLAEEHIDIFINNAGFGVCGSILETEEAREEEMIQVNVAAMARLFRAVVRKMNAQGGGTILNVASSAGLLPGGPYMAGYYASKAYVVSMTRGVAEELREMHSPVYVCALCPGPVDTEFNDHAGVVFALRGITPELCVEEALLGMMHRKTIIVPSAFMRLCTSAQRLVPIPLLMPIVARQQKKKLGMHRDKVRRSAQAVALKSNGSAYCFLAEKQKSKESTTKLHKNVPMAQCTPKSFDLTGKVALITGASYGIGMAIAKAMAANGATIVFNDIKQELVDKGLASYAEAGIKAHGYVCDVTDEDAVNAMVAKITEEVGHINILVNNAGIIKRIPMTEMSAAQFRQVIDVDLNAPFIVAKAIIPDMIAQGGGKIINICSMMSELGRETVSAYAAAKGGLKMLTKNIASEYGAYNIQCNGIGPGYIATPQTAPLREIQPDGSRHPFDQFIVAKTPAGRWGEAEDLGGPAVFLASEASDFVNGLILYVDGGILAYIGKQPQMEKAHQDIPWVPHAEISPEPCGPGVQRRVLAYSKDAMCVENTFETGGVGAMHCHPHTQITYIVSGRYRFTIGDETREVGPGDTLLKQNGVMHGCVCLEGGVMLDFFTPMREDFVMKIALINENSQAAKNGIIEAALKKVVEPMGHEVVNYGMYAADDAAQLTYVQCGILAAILLNSGAADYVVTGCGTGEGAMLALNSFPGVICGHVEDPVDAYTFAHVNDGNAVAMPFAKGFGWGGELNLEYCFEKLFGFGHGQGYPKERVVPEQRNKKILDGVRAATFKPLIECLKSIDQELLKGAVAGAKFSELFFASCKDEELAAYVKTLLMQGLTLFNLNLTHLLDAFLETAVPMIAGLAEVVGLFIIITSLAKATFYYVRATFFNDHRDFHHEMSSGLTTALEFLMSAEIAKTFLLQNLESVVPLAATFALRALMSMLLHWEMEGGHRPANAKEKDKSGAPKDGKNGMFSSVNTCWTLVGAFLVYFMQAGFALCEAGFTRAKNTGNILMKNMMDFCIGTPCYWLIGFGLMFGGTGALIGGFDPFIQGDYSHLGLDIPLWVYIVFQTVFCATAATIVSGSMAERTNFKAYCVYSAAISLVVYPICGHWMWGGGWLQSMGFHDFAGSAAVHNVGGVIALLGAWMLGPRIGKYDKSGNPHAIPGHNLTAGALGVFILWFCWFGFNGGSSLSLSTDATMTLTGLVCFNTNLAAAVATCVTMIFTWLRYGKPDVSMTLNGSLAGLVAITAGCDTVSPFGAFFIGFVAGILVVLSVEFFDKIAKVDDPVGAVSVHFANGVWGTIAVGLFSTGSNTAHAGLFYGGGLAQLGTQLLGLVCVDVYVVVVMFIIFKIIDKTLGLRVPAEVEIDGLDIHEHGLASAYAGFAISDANSAAMTPNENTDLGEDDVTQASAKQMDAAVPVVREPVIHDGVYDTGMHKVSIIAKLAKFDQLKTALNDLGVTGMTVTQVMGCGIQKGTPEKYRGVPVDTTLLPKIKVEVIVSRISVDAVVEAAKKALYTGHIGDGKIFVYNVTRVVKIRTGEEDYAALQDVEMKIIYKDGHVDECPQDQELHVIRHTAAHVMAQAIKRLYPQADFAFGPATENGFYYDVDLGDQKLSDEDLANIEKEMRKIVKENLPIKPFILPRAEAEKLMEERQEHYKVEHMADLADETEFSFFQQGEYVDMCIGPHLTYTKALKAFKITQQSGAYWKNDKENKMLTRINGVAFRNQEELDAWEKEQQEARERDHRKIGKEMGLFMTDDLVGRGLPMFLPAGYTVWQELENYIKEKERARGYLHVMTPCIGTVNLYKTSGHWDHYRENMFPAMEMEGESYVLRPMNCPHHMMIYANRPHSYRDLPMRIGEIAHDFRYESSGTLKGIERGRHFCQNDAHLFCTPEQIKSEVANVCDLIFETYKDFNITDYRCVLSLRDPADKKKYHDDDAMWNHAEQALREVLTELGIHFTEEIGEAAFYGPKLDVNVKPAVGAEYTLSTCQLDFCLPAKFHLTYVDKDGSEKTPVVLHRAILGSLDRFMAYLIEETKGKFPTWLAPTQVKVLPVSEKTLEYAQDVTEKLSDAGIRVVLDDDNQKIGYKIRAAQQVDRVPYMLVLGAKEAEAGNISVRDRKGETAEMSLEDFIAKVTTEIRTRSLMTPASTTAECRGEPLPGVPVTALRGARFPAGERAIRVEPWNADIMAGCLQHPETRGSPLCGMKSGASVCPHQCFGQDETTLIVARQSKKIKRMNEAVTKRFLLYFRLMLLVWILIANAVIHLTGMEYSWLIFLSNIMMFTLEGDVKDRLVTVELGGLVGLVLTVAALLSISALTPVLGDFLGFILPLAVVLFILIILHPYAPKVLNNVGFAYLTVACIDIPALTTHLPQFFITFIVGSVLFNGVCVLLMKPAKALAVRSVEKQGAMCENSCHYSIYGKKEKVFSGILTPQITFFVSFCKIALKTVFVMKTLKAVVAKYNQTSLILRILIGLAVGSVLALVAPGAGWVGELGSLFVGALKGIAPVLVFVIVASALAQGSSKLDRRFGTVIWLYMLTTFLAAAIAVITSFMFPVKVVLADAAQSDVIPQGLGEVLSTLLTNFVANPVSALMNGNYIGILFWACMFGIAMKNIGAESTKVFLANTADAVSQIVRWIINLAPFGIMGLVYTNVSGNGLAIFTQYGKLLALLVGTMLFMALIVSPFIMFIYLRCNPYPLVFRCLKESGLTAFFTRSSAANIPVNMSLCEKLDLDKDMYSVSIPLGATINMDGAAITITIMTLAAANTLGIQVSLPAAIVLSAMSALGACGASGVAGGSLLLIPMACSLFGISNDIAMQMVGVGFIIGVVQDSVETALNSAGDVEFAATAEYHQWLKEGKPLPAFLKGMDAEESKKNCVRADADPQRPRNGKEHRSMKNWKKLLACLLVGLMALTVFTACDASVGAPMGPEHSNAESKSVKALRDRFKVSYSEELSDKAYTIASWVAGTEPSCQTSKDKLYRWAHVDNVVKTYLEKKSYATAFENMGMGILGTDTFTPGFDWKPDADDPSDIIFVLPKDGTYPEAMTTAAKGKTKLGVAYVVKDGVSYAVVLFGMTAIGVIVALIVAVVGVAAGYFIGYNNRKKTAEAQIGSAEAEATRLVNEAIKTADQKRKEAVLEAKDEAFRLKAEVDAQKAEADKEIKQRRAEISRQENRIDQKETALDRKTEALEKKEEELKKRAAEAEERLAEIDALRAKEMERLETLAGLSQEDAREVLLHKVDEELTHEKAVRVAAYETDLKENCDNIARNLIGQAVSRCAADHCSETTVSVVPLPSDEMKGRIIGREGRNIRALETATGVDLIIDDTPEAITLSSFDQTRREVARMTLERLIGDGRIHPARIEETVEKCRHDLELQMKREGERAVMELGIHGLHPDLIKLIGRLKYRTSFGQNALTHSMEVAWVAGLLAGEMGVNVTMARRAGLLHDIGKALDHEIEGSHVQIGVDICRKYKENTQIIHAIEAHHGDVEPKTPLAFIIQAADAISAARPGARRENVESYVKRLENLEEISSSFEGVEQAFAVQAGREVRILVKPDVISDDQVILLARAIAKKIEDTLDYPGQIKVNVIRESRAVEYAKMLLPVPPVLGGAYGFGVTFCIESSFYIIARVLLRSVSCFMPETGTGVTQKPAYSVFDSILLNIVRNICPLVKRKTLPAEHFVQKNKNKMAEGVLSFKPKGLPRRTEQPFWFMMKRRKMNFWNNFAAKHPAAAKWVREGGLFVIVSNLITVFKYLLLQFLPKAFASLPVVDFGWPGIDITLFGETFKWNILGYDAAHGGLPYFCAYMIAMVIGECINFPIQRNFVFRSKGNLAKQIGWYVLAFCVITCIVNSINCIWVAVAGLLVPDFIYNIGTTVLNGGISMVIFFFVNKIIFPEGEKAAKMKHQDIIAKLSLEQKCALLSGGTVFTTRALPGKGIPAITLSDGPNGVRKQAGAADHLGLNPSVPATCFPTSATVANSWDPALGEAVGAAMGEEAAAQGVSVLLGPGLNIKRSPLCGRNFEYFSEDPYLAGKMAAAYVRGIQKNGIAACPKHFAVNSQELRRMASDSIVDERTLREIYLTGFEMVVKEAQPKTIMSAYNLVNGTYANENAHLLMDILRKDWGFDGAVVTDWGGSNDHALGVKNGSTLEMPAPGGDAIRELMKAVQTGKITEADVDARLEELLELVFTTKAAVDAAPGKFDADAHHALARRAAAQSIVLLKNENSLLPLAKGEKVAVIGDFAQTPRYQGAGSSAVNSIKVDSFLDCLAESGLNSVGYAKGFDRQGKPDEALKAEAVLLAKNANVVLLCMGLDEIKESEGIDRADMKLAENQLELLAAVAAANPNVVVLLSAGSSLESAWVKDCKALVYGCLGGQAGAGALVEVLTGAQNPCGKLAETWARSYADTPAKEHFGGDGPTVEYREGLYVGYRYYDTAGVPTAFPFGYGLSYTSFAYSDLKADEKGVTLTVTNTGSCAGAEVVQLYVAKPDAKVFRPVKELKGFTKVQLEAGESKTVTIPLDDKAFRYWNVATDRWEVEGGSYQLLVGASSADIRLTAAVTVAGTGAPDPYAGKDLAHYRTAQVQKVPDAEFEALLGRPIPENKVHIDRNMTLGEMGHGRSPIGWLAAAVLGTLLRRSIKKGKPDLNILFQYNMPLRALSKMTNGAISMGMVDGIVMELQGFWIIGLVRVIFEAVKNLVLNSRMEERLKNSMKRDPNNKKPTKLLTAVTALLLAVGIVADVAMFGVFPSSLDKAFPGQNGDPELQKTSYANGLSVAQKVEEEGAVLLKNDGALPLAGTNRKINLLGYASANPVYGGTGSGGSSYTANRTDFVKAFTDAGFEVNQNLVNLYRPKNNEGGNTFSVDFSIPELPATEELAKDMGVEYQYTGDCSFEAMKDFSDTAVVVFSRKGGEGNDLPTSMAENTSYAPDQSKHYLELNSAEQSLLEQAEATFDNVIVLINSGNAMELGFLNDEGVDAALWIGDPGDVGTIGIVNILTGAVNPSGRLPDIYPYAVETTPSYYNFDTFEYTNSKDCFKNFESHPAYLVEYQEGIYVGYRYYETRESYDYTTREGENLTGLSYNDVVQFPFGYGLSYTSFDWELENTIPTTVTAQDTLEWNVKVTNTGNVAGKDVVELYYSAPYYSAAEGGSGLQKAGEVLGGFAKTKELQPGETETVTISMPVEQMASYDAQKYYTSTGSYVLEAGEYQISLRTDSHTVKDNLTMTCKVAENEVFQDSAFGSGVENCKYVGKRSSDEVVATNQFDDAAGDVAYLNRDTWQIVPGTSKEATAEQLEAFNNALVVDDSYVDADDTAPTFGAKNGLTLKDMEGLAYDDAQWDKLLDQLTLDDMYKLLGADGWGSAAVDDIGKGQTYEMDGPAALSYVFDAFMGTCTYKTVTYPAEVLLAATWNVDLASEFGDAISQEGKAWNISGWYAPGANTHRNAFAGRNFEYYSEDGFLSGSMSAATVGAAEKNGMYCYIKHFALNERETWRHYGLCTWADEQAMREIYFVPFEKAVKEGGSTAVMSSYNNIGTTWAGASTALLTNVLRNEWGFIGTVITDNNEEHGFMDIEKAVLAGGTNLLFGWGTKTFDNLSQTATGQLKMREAAHQYLYTLANSYGVDVDAPVPMWRTPALVGSVIVYVLVLAGVVVILRRRKYNKTLANTNAGADVSKAMTALPDIPRLYTALAECLAVLLFTPALAPRFSRAVTGGITLLWAAGLSAFLELTGNVPGGLWIPCMVTAIGLSYLYLWGVWSITLLEAGYHCARAFILAELAASVEWQLHCALWPARGPWEPLSLLLLALVYGTLFGIMCYLQHRRPQPAGHLQIGGSAALTAVMLALTAFAVSNLGFLPGSEINMSIFSIRTLVDFSGVLILSVQHEQLQENALHSELAAMDEVLHRQYEQYKRSKEGINLINRRYHELKIQLARIREEQDQAKQNAAIAAIEQNIRQYEAENKTGNPVLDTLLTAKTMECQQEDITITSVADGRMLGFLTIRELCTIVGVALDNAIAAVRAEPDPEKRLIKVAVYSQGGFAMLRFEHYTEAAPALDADGLPQQGSDLKSVRTTVGQHGGSMTMHWENNWCTLRILFPLPKNKMIRVAIVEDDAEVQGVLQEYVRRYTRQYGTEFEVTVFADGVDILEDYRAVYDIIFLDVEMKHLDGMTTAERIRQMDADVILIFITNMAQYAIRGYSVGALDYVLKPVPYFAFSQQLLKAVARLEKRAKHYLTVPVEGGLRRLDTASIYYLESEGHRVHFYTDEGDFSAPGALKAFEEKLADCPFARCNSGYLVNLAQVRELRQSTVQVGPCELQVSRPKRKAFLAALTDYIGGEGSMWNCYGSIIAQSRPVCQGALRNKGQGSPQLTTVDVNPYQLGMEAASQTINHIENPNLLATKIIVPHKLIPRESCCPPEEQRELPAQHDLRHHAAKAPTCTGIGWDAYDTCSRCDYTTYAELSALNHDLKQHAAKAATCTEKGWNAYDTCSRCDYTTYAELPALNHALEQHAAKAPTCTEIGWDAYEACSRFGCNYTTRKELPALNHDLKQYAAKAPTCTEIGWNAYETCSRCDHTTYTELPALNHDYQAVTVAPTCEADGYTVFTCSRCKDSYTADPTDQLGHQFGAWSPNGTGSQSASCLRQGCAHTGSTDCRKFTFRTAEGETLTFCPVCGQAENAAQLEMIEAATAWANSGSLSAEDVTARTNGEYLSVAFETAGSLTQPTGRVRLALPAGLLEGKTLVRIAPDGTQTEMPFETERGTIILTLDFANSELPVMLFRLVPQPTALMFERKKTSGKLLSLPIDQIHPSPFQARKSFDEQELTALAQSIRENGLLQPVTVRKVAEGYELVAGERRLRACQLAKMTTIPAILCSYADDRTAALGLLENIQRADLNPFEQAQGLRDVMVLWDCTQAEAAKRLGMAQPTFANKLRLLQLTADQRQFVLDNNLTERHARAVLRLPENRRSEALITIAKRRLNARQTDSYIEQLLNSPPKAGHRISMVRDVRIFVNTIDHAIRLMTDNGVPATAHREEKDGYIEYTVRIPTAAAEKMIDKQRLEEKCSTWNITLTGTQLDQLDAFAQILVDYNQKVNLTAITDPEGIEDKHFLDSLLFASQPEVAGRMVDVGAGAGFPGIVTKIFKPELELTLMEPTGKRVEFLKYACAQLGLTGVEFAKERAEEAARKVWREQFDLASARAVAALPMLAEYCLPLVKVGGNFLAMKGASGEEELTAARGAIKKLGGEYRETRTLHLPGGDTRTLILCKKISQTPTAYPRNGGKIAKSPLKMNHLGEYDVIVIGAGHAGIEAAHAAAVLGAKTAVFTMSLDAIGNMPCNPSIGGTAKGTLVREVDALGGVMGLAADATYLQSRMLNKGKGPAVHALRVQTDRRRYNEYMKHALEQTPGLAIHQAEVVALEVENGHVKGVVTQLHGEYTAKCVVLATGTNLGGKIFVGDAWYASGPDGMHAANALTDSLKAAGLPLRRFKTGTPARVHRRSIDFSKLECQPGDPDSELQPFSFLTDAPLHNKVECWIAYTNPETHKIILDNIQRSPLYGGMIEGVGPRYCPSIEDKVVRFSGKDRHPLFVEPCGENTEEMYLQGASSSLPEDVQNAFYHSIKGFEHLEIMRPAYAIEYDCVDPTSLEATLESKVVRGLYGAGQFNGTSGYEEAAAQGLLAGLNAARNALGKEQLVLPRHTSYLGTLVDDLVTKGVMDPYRMMTSRSEYRLTLRQDNADQRLTPIGREYGLVQDDRWAKYQHTQQILEAERRRLHETHLRTADLRAAMEAAGLAPAAEGGIAEELLRRPEISYPLVAGIIGWGEEITPMLAERLETEIKYAGYIARQDRMIREVARHEKTLIQEDFEYAALTGLTLEAREKLARIRPRNLGQAGRIPGVSPSDVAQLSIALAGKQQKMQEATIAAIATAPGAGGIAVVRLSGAESYQVAARVFCPANAAKKVEQAKGYTAMYGHFVDREEAFDEGVALFFRAPHSYTGEDVVELSCHGGSAVARRLVEACLAAGAQPAAPGEYTRRAFLNGKLGLTQAEAVMDLISADGRQGAALANAALGGALAKKINAQKAQLTALQAHLAAWVDFPEEDVPELDPAHLRTVLGAVREELDALIRSYDAGAVLREGVDCAIVGRPNAGKSTLLNLLAGFDRAIVTPVAGTTRDVVEQAVQLGDIRLNLFDTAGLRETEDAIEAEGIRRSWKKLEEAGLILAVFDGSEPPSREDLALAQRCAGRPAIALVNKEDKPTRFDAELIAPYFAMVLPVCCREEGSRKVIAAAVARLLGTGSIDPHAASLSGQRQLSAALRARDAVAGALDAAAGGFGLDAVSVCVDDALDALCDLTGENASEAVIEQVFERFCVGKMSQNKISRRSFLRGAGASATIAAASCMAPSAAACDIKSLWSMDLQILATSDTHGKFDPWDYAANKADASGSVAQQATAIKQCRTRNTLVVDAGDTIQANSAELFLNDDLHPMIAAMNAIGYDIWTTGNHEYNYGMDVLKKVMGQQKAKVLTGNVYAPDGTPLADGYTIIKKGTVKIGVIGMVTPNIIRWDAKNLEGWKVTNPVDESRRIIDKIKDQVDVLIGVMHMDTENEYGVYGSGVTDLANACPEFDVIVGGHGHRSIPNMMINNVLVVENKNAGATLSEIHVYLERQLDGKWKVVNRTSENLQIKEYEPDPELTALLAPYDTRAKEDAVTPIGELKGGDLAPENEIDCLPQAMVQDTALLDFINEVQMYYTGAQVSATALTSMTSQMRAGTIRKCDMASIYTYQNTLYKLQMTGEQLRRFMEWSAAFFKTWKPDEVTIAFDPSVRYYLYDAFEGVNYELDVSKEPGHRIKNLKWPNGKAVKDTDTFVVAVNNYRATTQLLTAADIFLPGEDLPKLLEIDVRGDVGGIRELLGEYIRTVKGGTIEPHVNNNWKIVGNNWKAADHQKAVQLLREGKLALNENADARTLPGKAITTAEIAKFMFLKSFFSKFGETACFLPKSFSQMAIVKQLVKDLYCSQGRSVREEQTEMIRTQESTGKTVDEARAKACALLGVQADDLNVSYEVLEMPQKTGFLGLKTTPAKVRVRVELPDAPAAAPAKPVAEQPVETAAPVQETAPVAEKAPVAEEEPAAPAAEQTPAAQQPAEAAEEAEEVEEPIVIEENAKVKAAVDYLREVITLMGVENVTFSAVQKGEATIIRLDGEKLGALIGRRGETMESLSYLASLVANRLEGDYIKLGLDVAGYRDKRESDLTALAQRIGAKVRKTGRSFAMEPMNPYERRIIHSAISKMEGVRSESKGEGRDRRVVIYSTAPDAQTENTYGERRGRGGNRNGRRPGGNRNGGYRGERRSNGGYRGSRSGAPRGPRPSSVPERTYAPRDAESAAPVAPKRTERVDDFADFSFGKIELMNFFYILSGPLGYVMEWIYKLLPNYGWDIILFTLLINIVKIPLQTSQQKSMAKMSAFQPMIAEIQTKYKNKPEKQQEELMKLQQDFGYKPTAGCVPMLLNFLVMFGVIGVVYNPLERIFHISAAALASAGEAMTAAGISFTAITRDTNIIAEVLAGNSGVLGCFSVEQIATITEFGQHMNFFGIDLTRIPQIGLSLDIVLPLLSVITMFLSTHISMKASGQQMQGSMKLTMYMMPLMYLFFCFTFPLAFSLYYVISNIVMTVQTQVMRKFYDPEKMRKEVEAEIAAKRKQEKRGVKNTTITVTDPKTGKSVEKNLSASEMNKRRLEYARQLDAERYKDERTVPLSELDKQDKQMNRLQMLCRRALCVPIRIYQYTLSPWIGRSCRFSPSCSNYTMQAILTHGCVKGILLGAWRIARCNPLGKWGYDPVPPPGRWQSPARNLQPAKLFEKRHRGMRYRPIRRNSEFGRVYARGKSYVNPALVLYVLKTRGRNTRVGLTATKKIGHAVQRNRARRVMKAAIDEHLDHNIGGYDLIFVARGMTPKLKSWQLSSVVAKLFAQAGLPDKAKRPDAKPPATVPPARKQKPESRVMKRTFQPKKRQRKEVHGFLTRMSTKNGRKVINARRAKGRKSLTVMDSFKDVLEAAQMYCKAQMAEPTYNLYIDGLEPISFEDSSHITLSVRNDFICKIVTDRYLGLLKEAFKSVLGFDVDITLVVPSTPPHEVVLAQQYEANPASPQGNYEFTFENFIKGPSNQFAFAAAQAVAANPSGAYNPLFIYGGSGLGKTHLLTAIQTEIKRTHPDFVIMYVTCEQFTNELIAAIRAGSTEDFRMKYRVADLLLVDDIQFIAGKESTQEEFFHTFNSLHDAHKQIVIASDRPAKEIKSLEERLRTRFEWGLTADVQPPDFETRVAIVKRKAELLHLDLPEDVAEFIANHLKNNIRQLEGAVKKLNAYYMLEGIQPVISVAQNAIKDILNETQPVPVTIEKIIGEVSRTFNVSPADIRGTKRNANVASARRVAIYILREVTGMSMEEIGREFSGRDHSTIVYSLKTMERDMKNDQHLRETVSDIIKNVKAMSCREAGLWLSTGMWKAREGNVERWGTVFLSTADVKNMNIVCDKTLLSAAIDGVSKAVTMRSSIPVLEGILLKAEGFQLTLTGYDLEMGIVTTIEANIKEPGEIVLNAKLLSSMISRMPAGQISIVAADNGKTTIQSGVAQFEIQSMPATDFPDLPNTGAEQTLTIKTGVLRDMIDRTLYAVSQDEKKPAHTGELFEIELDKLTIVALDGYRLAIVERPITAVKDIRIIVPSKTMTEVSHLLANDDEEDVHISANRRYVVFTTAGYTIMSRLIEGEFLNYRNVIPAGSRTRVTIDTKDFISTIERASLIITERLKNPLRISFTEGKVVVRCQTNLGRVVDEFSAACEGDEVEIGFNNRYLLDALRNARTEQVRMEISGPLSPVKVLPVEGNDFLYLVLPVRFKNDMQKILIHTEFIKLDALLKFAGLCETGGEAKELVQGGAVKVNGEVCTMRGKKCRAGDIIELDGQSVEIGQGQMRLLSLEVQNYRNICAARLEPGRELTVICGNNGQGKTNLLEAIWLLTGGKSFRGGKDAELVRRGEAFAVLEADTQRDRPEGCEPAEPAHIRMTVGTPEAAKPGRYAAVNGAAPKRAAALAGSFPAVVFDPGHLSLVKGAPEGRRKFLDAALCQLYPGYLASYRRYVRVLQQKNALLRHSANGQERPYAEKRTLLEVLNTELAAQGEALQQRRREYLKLLAPRACANYAELSHGAERMSIRYAAQFAPGGLADLLRQRQEEELRAGQSLCGIHREDLELLLDDQPARVYASQGQQRSVVLSLKMAEAAAAAQITGEHPVLLLDDVLSELDEGRKQYLLTCMKEKQTFVTSCDDTDFLKTDGEVYRMDGGVLNRVMYIHLGRDYVLNDRDIIGIFDLETTTISPRGREFLNYAQKNGAVVSLSDELPQCYVLADGGLVDAVYLSELSSAAMRRRAQKMVEMKFAENGRKIHRKKRDGKAPELPGKPHRASRNALCGQRVKTQQNGEKKVHHGVPVPALLMAEEIITSTNADTVTDHEYNASEIQVLKGLEAVRKRPGMYIGSTGERGLHHLVYEIVDNAIDEALAGYCDHIEVKILKDNIIQVTDNGRGIPVDIQADTGLPAVTVVYTILHAGGKFGGENSGYKVAGGLHGVGASVVNACSEWLTVNVRRDGKEYEQTFRRGDPDGDLKCIGTVAEGVTGTRVTFKPDPEMFKDTTVYDFDTLEKRLREESFLNAGVKITLTDERQLYTPVLEDGQEGDPCYRSEVMCYEGGIKSFVTYLGEKRKLEVLHPNVIYLKGQTDRGVAEIALQYNSSYNELLLSFANNVNTPDGGTHEEGFKASLTRVFNDYGRSHGLLKDKDENLSGADVREGLICVISVKLQEAEFEGQTKAKLGNTEIRTLVSNMVYSKLMEFFEENPGVAKAIFEKATQAARARAAAKKARELVRRKSALETSRMPGKLADCREKDPSRTEIFIVEGDSAGGSAKMGRDSAIQAILPLWGKMLNVEKARADKIYGNDKLMPVVLALGCGIGDEFDISKLRYDKVFIMADADVDGSHICTLMLTFFFRYMRPLIEQGHVYVAQPPLFKVQKGNTIKYAYNDAEMAILSQEMPGAKVNRYKGLGEMNPEQLWETTMNPDNRVIVQITIEDAEKADEAFTILMGDQVEPRRRFIETNAQYAKLDVMEEDYVMIPGSGTKKIIRDVKKEIETAFLDYSMSVIVSRALPDVRDGLKPVHRRILYTMHERGNDPSHAYRKSADTVGAVLGSYHPHGDASVYDAMVRLAQDFSLRYPLVDGQGNFGSVDGDPPAAYRYTEARMSRMAVEMLTDIEKDTIDWDPNFDETKKEPSVLPCRFPNLLVNGSQGIAVGMATNIPPHNLSEVIDGCIAYIDDPDIDLPGLMEHIKGPDFPTAGIIMGRSGIRAAYATGRGKITLRGRATIEETKNGRTQIVITEIPYMVNKARLIEHMADLVKEKRIEGITGLNDETNRKGMRIVVDIRKDANAQVILNQLYQYTQLQDTVGVIMLAIDHKVPKVLTLKQMLQKYVEFQDEVVRRRTQYDLKKAKERAHILEGLKKATDIVDELIATIRACKGGMAEAKAAIMEQFGFDDPQADAIVKLQLGRLAGLEILKIEEELAGLQAKIEDWEAILADDARVLAIVKDELLEMKKRFGDERRTEIQSVTGEVDIEDLIAEEQCVYTLTEAGYIKRQLKATYQAQRRGGRGISGMTRKEEDIVQEMFVGSTHDYVLFVTDRGRLFRIKGYTIAEGSRTSKGMNIVNLLQLAEGEKVTNMICQSKDAEQSGGYVTMVTKQGLIKRTPLEQYANIRKSGLIGIALNEGDALAWTRLTSGHDMLIVATRNGQAIRFNEEDARPMGRNGHGVRAIRLAEGDEVVGVCICREGGTVLTVTENGKGRRSDIDTYRITARGGKGIRNYDVSRDKVAAVKIVDDVDDVLLSSQEGIIIRLHANEIPLQSRYGSGVRVMRLGENDKVMVLARTDHDDEAQTEKIDASEADAEPTAEQLAEMEAADAAAATEAPEADPEEKEMKKETKKSILFYAASALLYMASLISFISGNDNSMAVVWLCLGSSFLCLGSTHLCLGLSRKKKGNDKTDASNKMANEIKKELIQKKLDLVVQKLMHLGAPENEDTLKEGGEAIGFFSRDFGIKEWDWPQGIGLYGLLKIAKMQDSEEYRTFLHDWFKENIAQGLPSRNINTTTPLLTLCELNEIYHDPEFEALCLDWAKWLMECIPRTREGGFQHVTSANGDRQGVRLNESEMWIDTLFMTVLFLNRMGQKYGKQEWIDESIKQVLMHIKYLYDTHTGLFFHGWSFNRMDNFGGVFWCRGNSWFTLGILDYLDMFKGTLNQGVKTFILDTYKAQVRALRDLQGEDGLWHTVLDDSTSYEETSGSAAITAGILKGIRMGILDDSYLPCAKKAIRAILKNIDTDGTVLKVSGGTGMGYDRDHYKNILIAPMAYGQSLTILALVEALETFEMKTTWLHSMVQGDATQYYRKRNGIMVEHMVRPANFDMRYNHFHQEYEIYLLLRGRRQMFFENRAYEAQAGNLILVDSGQIHMSHSIVGDPETEYERVILYVDRDIVEKVDKMFPELKIGAFFHKHYGIYELTPKQTANTRRLFLQIMEELDKAEPMSQTAILSELILGFIYFRRSNQQVACLNDVQEGKASGGKFDAVYQISDYISDHFQERLSLDSLAEQFYISKYYLSRSFHEVTGFGINEYINILRVKKAQSLLETTTLSVSEIASRTGFESITYLGRVFKKYQHVTPAQYRKSLTSTAEKNNTNTMTIKKTSKILLTVIVVVLLGIGVSTFFKVNGSIGSDKIQLRLAHGQAGDSEIGGTITPPVGNVLFVGCSLAKQRLENVMKSLVPFFVAIFISLMLVTYIPALSEWLPTTLGLMMRSNNIAQKKRTNWSKKLFVCRRMARNIVHFSKTIEKSARMYTTQAQYRLNFWLHSQFFARKLAPKAVMEHMAWKGRIKPGCKAEYQKRHAEIWPEMVKVLKDAGICNYSIFYCNDELFGYYECEKGVAYAEKVQAESPVVDRWNAYMKDILELEMDPVTGAQPKLEQVFRLNMGILDIEIVKGFMRMCNDGWLQGWHERNGGNLTYRMKEEEVAQCRLFFDEQPREWVNMGVQADNLAGEYFITTGSGKFFRNVESDPVHSIGIVEINDKGDSWRIVWGLEDGAKPTSEFPSHFMNHSVRKAATNGANRVIYHCHATNVIALTYILPLTDRDXXXXLWQSATECPVVFPEGVGVCPWMVPGGADIAMATSELMKTYQAAIWAQHGLFASGPDFDITFGLAHTIEKSAEIYVKVLSMGGGIIRQTITDDDLRAIARDFGVTLNEKFLNMKIVPVFHGKTGGGYLTQFYPHLGPVTYLGITQDKDGHFKFVMAEGVNEPGPIFTFGDTNMRTRFTCGAREFCNRWSEAGPTHHMAAATGRHIDTILKVAKIFDVPVDIITRMTMFYIYRALEDLFANSYKKTIKDLPSSAKHGIYIIRNIALLNILPFNDVMTAVIYARYSSDNQREESIEGQIRECTAYAEKNGITIVKHYIDRAISAKTDNRPEFQQMIKDSDKKLFDIVLVWKLDRFARNRYDSARYKTQLKKNGVKLMSATEVISEGPEGIILESVLEGYAEYYSADLSEKVIRGMTENALKGKFTGGAIPFGYIINTDHRFEIDPLTAPFVAETFQRYNDGQTMREIRDWLNEKGVKNQRGGLMTFNTIQHMLNNRRYIRELKFRDVVVPDAIPPIIPLELFEDVQEKIAKNKKAPARRKAEDDSLLTTKLFCGYCGALMFGESGTSRTGEVHRYYKCATAKKHKGCKKKTVRKQWLEDLVVNQTMQLVKDDSAMESIIAKVMELQNKENTNIPLYEKQLRDAESGIQNMLNAIQAGILTSSTKERLEQLEETKRELEARIAEEKLAKPKVTEEFIRFWLLRFRKLDMRLKDQRQTLVDTFINAIYLYDDKVLITFNYKEGTQTVTFGEASEVASEGSGSDLDCIPAPQKRQLSKAVFFVLHDYFPLAATADNRTMKKRNIVHSALSLSLTAALCLSMAACGGTQTPADSAAASQPAAPSAAVQPSSAEQASAALPVKALNPKQVEENPYMAKSDANIHHDGYNTDSTDEILPLAIYPEINVSYETTNANASPAIYFDSYGHAVVPLLGGIAIRDLNAEETKTLGYFSPKKHDGGGYVIQSSYTFLDESNRIVCPTSNNHVLMLRATDENGNVLPEFEKVLDIDIKAAAEAALGKELTQNLLSVVFDYDGNLWFATGGFRIYPQRQQQGVIGYIARSAIDAILNGEQTDLSKAVFVHELTPGEGAENGIAASKDGAVVLTNQNCYLLRAEEGVDVVWCTPYESAGAKVSGEGDKTTGGGLAWGGGCSPTLTPNLVLFTDNQDPVNLLALDMKTGEVVASTPVLDDLPEGYQVAVENSAIVYDDGEGTVSTIVCNWFGAGNAGLADPNNDSSIQSYANIYDQNWLMKGNIMIAPGIERMDTVKTANGYEMKSIWSRNDLSDTSIMKLSTATGYIYGYVQDVTTGMWQYIILDFETGETVFTMDVSNKYGYNNMAIGMYAGNSGNALYCPTGYLELLRLQDRFVYLPEMPYRKVELDQAARNVLSQERFAQDGGEGTVASWRNTVTVRNVHPNTTVAFRMNNLSGSTSGLTLYAYGVDGKLAKVDPALWSITDEDGKAVTELTAGTLYELHVTVADGGALDLSETEKEIRLSVVLGKMYRIAVLTSSRAQEAFLAEQISRFCAEHCLFPKMDCYHDQESFFEAARNEPLTNAVIALPGVDGLNAVEHLRALCPQTRIIWCSDLDFSLHAFRLRADYFLLEPVTEAALRQGFRIWLDGKKSGGAALVMRIAIVDDLDTERTLLKERLVRQLSQRGADAELLEFDSGEAFLAAEKEQRFTAAFLDIYMNGLSGMDAAKELRKTDADCLLVFTTTSTDHALEGFQVRAFHYLVKPFSEAELSGLLDEMLAKLPRPEPVLVVKVDGSDIRLCYRDIISAEHFAHMINIRTTAGKTLATRQSFKAFTEPLKKDPRFFVCGRGAIINMENAADFQAAAFCMTDGSRVYVSQELLKAARQAFMEFLLQRGRVGMKDVLRPILELTVVFPGLLLAYFPVGSYLKLPPAKLAAGAVPLLLGLCLGGGLLCYHFGISTAFSVLLITLTAIFLYRRTLRISLWKSGTIALAVCAVFACLNSLSRAVGTAIVIRMQLPPGKPWFCFGACIFYNAVCWLITAAAYYPATHAVRAMVEDDNFAQTWYVFWVLPLVFILLNLFITPRYQITLRTGRVLQVYIVMSIALLFLMFMFNAIFLLMANSLNRNARLQQENQFLSMQQQRYESLKAAIEEARQARHDMRHQLNQISALAEAGDLDGLKAYLAKTVSRIPDLDMNFCENRAADSVVGHYCALAKREGIPFCARLNLPQVLPVDEMDLCLVLSNLLENAFEASLRTAPARRKIEITAYVHAERLLLVEVENAFDGVVHEKSGVFRSSKRRENGIGIQSVRHIAEKTGGASTFTYQNGIFSAKVMLCGMQKNYVQEILSIIHSGLPKAELAEKLSDYHEKDLADALEALTPAERQSLYSILGVDTVAEIFAYLDDAEPYLKELPSHEVAKVISNMDSDDAVDALEDLDDTDKNEIVNKLDKDSVEDVKMLLSYDEDEIGSRMTTNYISIKNDMTIRQAMSELVKQAGENDNISTLYVVDKNEHFYGAIDLKDLIIARAEESLESLIVRSYPYVTDREQISDCIDRIVDYAERSLPVLNDAGKLVGIITSSDVVELVDDEMGDDYAKLGGLTGEEDLNENVFESVKKRLPWLIALLFLGMLVSSVVGAFESVVAVLPVVICFQSMVLDMAGNVGTQSLAVTIRVLVDENLTLSKKLQLLWKETRVGLLNGAILAVMALGFLGCYIHFFKGYVWTSAFLLSGCVGLSLIVSMVISSLVGTLIPMLFHKIHIDPAVASGPLITTINDLVAVVVYYGLAMVVLINLFHLAMFDTKKLALFLGGVVFGSAGFKVLSSKDAKKVYTQTTAAVLRMKDCTMQTVNKVQEEAGDILADAKAINESRAAEAAQEVIEDTAEEEQPAEQTAQMRVHVCAVRMTLHRADVLEAYLNGQDNIQKATVYERTGDVVLTYRGSRKDAAALLAAYRFDNEELEVLVTSHDSRKINQEYQEKMVSLVTGRVFRKVFLPAPIAAAYTVWRSIAFVWKGVRCLLHRKLEVEVLDALSITASLLRGDYSTAGSVMFLLTVGSLLEEWTRKKSLDDLARSMALNVDKVWVRTPQGEVLVPLTRVHAGDEVVVRSGNMIPLDGMVLEGEAMVNQAALTGESMPVRKTTGATVYAGTVVEEGECVLAAKAEGGANRYDKIVAMIEESEKLKSGTENRALQLADRLVPWCLAGTVATYAFTRNVTRAISILMVDFSCALKLSMPLAVLSAMRECGEYHITVKGGKYLEALAKADTIVFDKTGTLTHATPQVVQVVPFSGCGEQEVLQLAACLEEHFPHSMANAVVRAAKERGISHEEMHSEVEYIVAHGIASRVGGTRVVIGSAHFIFEDEGCTIPAEEQAKFDALDPQYSHLYLAASGVLAGVICIADPLRPEAAQVLHELRKLGITQTVMMTGDSDRTAHAIAAQVGVDRYFAEVLPEDKAAFVRDAKAAGHTVVMIGDGINDSPALSAADIGIAIHSGAAIAREIADVTIRADSLEELVTLKAIANALQKRVGSNYRFVLSFNSALILLGALGILPPATSAMLHNLSTLGISLRSMTDLLEQKPLPMEKTQAKPLTAAQKRQRDKKRRTWLRAGVQLFFFVSMPGAFVAGFSGVKQLFLHIGAGEVLSADSFTLSLLGLCGFTLLFDRFFCGYACAFGSLGDAVWALSGLIQKKLFHRKKPLRLPERAVLWGQKIKYLLLTGLVALYVTRQEKLLTGASPWEVFSRLTALRLPPEGFGVGIALLVLILLGMAVQPRFFCQFLCPMGAVFALLPVLPFARLHRQSEGCIPGCNACKQQCPVCLKLEESSLRSGECIACEACVGTCPKQNIHRWDLALCKHPWLPVLGKALLFFLLGCWLGFCRFIMKYKNFLLRAVNLLLILGVLWQYQQVALVRAAAVSQRKQEIAEVEAYNASVLQAQSAAQAEQSQSGYRDGTYEGSAFGFGDVIRVSVTIQNGKMTDIAVLDASGEDKPYYKQALPLLDEMLAVQSAEVDTVSGATLTAEGLIGAVEDALGKAAGMNKKRCNTLLPLVQLLPAVAAAAAVLFALPRTVPVLAAVPEKLTAVVEQPAEAASVEAEEEALPKLPYADGVYVGSSRGYGGAVRVQVTMENGSITEVEILDASHETKQFLRRAKRLLTTVVDAQSWEVDAVSEATYTSRGILGAVQNALTGEVVNNPLPPQPKPAAPLVVEEFTTPSTYLDGIYTAEAIGFEGKITVQVTVAEDKITDITVLSAEDEEEYLSRAKRVIPAILEGQSPNVDAVSGATYSSTGILNAVKLALAKAAVAPAEEAAPEQAAPEEVVEEAAPSEAAEPEETPVTAPTVEVVQPEEKSAVSAWFKEVWQQLFPAETPDDSEPEPASSAEVLPTSETALPPEETEPEPETEGAAEMRTKKFLSLLLSAAMAFSLLTATAFAAAPAEEENSFFDFLLGKKYTYLYAALTWDEYWANEKVYAAGSTAASAQLDSHEEQDLGAFDAVSRATVNHGLHRGSFQSTAVIYAKDGSSYTVSHWSDDGKTIYLADGTTVGWNRGTITKADGSTVQMDHYEVLGTKYVPVRVATSDLADFCSKYTVVENGGQLAGGYSEKNLTAYALTAAVDQNTNGLKYATKSGDGYTFSAAHTGTGSGVAEAAQKAAEGLTVNLRSGSDVGSFGEFIRVDLNGNYGELGSRMQSVVWTYYGNDSTYTHAKASYGTKFAADNWMHKSMGIQLGLSDSARCQLPEGTDGTGYWTITIRALGYADTVVKFQTTTENLAKHELASDADRAALQAVVAEAQSKAKAAYTADSYANLETELAESVELLSRETLYKAAALEQVTHLTDAVQNLKAAMTKLLHGNEKSSLTGGREPLFSQKELLVLAIPLLVEQLLEVTVGMADTMMVSRCGEAAISGVSLVDMINNLIIVLFAALATGGAVVVSQYLGAKERGNADKSAGQLLLLSGLSGVVIGVVCFVLARPMIRLFYGSIDTDVLDAGVKYLQIIALSYPFLALYNGGAALFRSIGNSKISMQISFLMNIINIVGNAVCIFGFKMGVDGVAWPSVVSRVVAAALILRKCYREDAVLTVPKTLRLDGGMAKRILGIGIPSAFENSLFEAGRILVVSMISTFGTVQIAANAVANNLDGMGVIPGKAISLAMITVVGRCIGAGDHEQTVYYTRKLLLWAYITMGLSNGAILLFLRQLVGIYALSGETMELAITLVTIHAGCAIIFWPLSFVLPNALRAANDVKFTMVVSILSMACWRLGFSYLLCVRMGWGAVGVWVAMVIDWTCRVTCFVLRFRSGAWKTKYQAMKLISWNVNGLRACLTHGFAESFAALDADIFSVQETKMQPGQADFAPEGYTEYTYSAEKKGYSGTACWCKTAPLAVTTGIGLEQHDHEGRVLTLEYPDFYLVNCYTPNSQDGLKRLDYRMEWEDAFRAYLLALDAKKPVILCGDLNVAHTEMDIKNAKTNRMSAGFTDQERAKMTELLAAGFADSFRVVHPDEVKYSWWSYRFHAREKNAGWRIDYFIVSRRIADRIRAAEIHNEIFGSDHCPVELQIDLMLKNYLLIFLISMVPIIELRGAIPIGLGMGLPVLPTYLLCVLGNMIPVPFIYLFARKFLIWGYHKPLIGPICRFCINKGEKGGRALEAKAGKGMTVALLLFVGIPLPGTGAWTGTLAASILDMKFKDVLIACMGGVLLAGIIMGLASAGLLGALSGLFAAGMDQALNQKINAYIAENKEQLLQDIAALVAIDSVEGTPEEGAPFGAGPRAALDKTLELAAGMGFATRNCENYIGYAELAGADPEKYLATICHVDVVPVGNGWTADPFKMRIQDGWLLGRGVSDDKGPMIVTLYALKFLKEQGYQLRYPIRAIVGDNEETHMNDVKYYLENYPAPVFCFTPDAEFPVCNGEKGHFGGKIVSPVCNGVIAEFEGGVANNAVPDRASALVKTDIRKLKNAPNITLEPEGDGVRVRGWGKSGHAAMPEGTVNAIGLVADYLLDNGLCNDAERAYLEALRKLHSSTAGTGLGIDCADGPFGPLTIIGGRIYMEDGKLVQTIDSRFPTCTNGEKLTAQITAALGEGAKLEDVDAAEPFYIEADSPAIRACIDTYNEVTGENATPFTMGGGTYARHFPYAVSFGPEHEDVKLPEFGGPMHGANEAAPIDKLLEAVKIYILALLRLEEIDFMNVLVIDGQGGGLGRQLVAALSAQCPDIRLVAVGTNSVAAQAMHKAGAQCAATGENAVVVNCRSADIIVGPIGIVIADALLGEITPAMATAVCQSSATRVLIPVNHCENYIVGVPDQPIGSLVAAAVQKVKALCAGEGCMSGGDRAEFLDIWQRNVTRPGGEKLLDWLDKKTDFFTAPASTRFHGACEGGLCMHSLNVYHALHDSFFTEGESEESYAICALLHDLCKANYYKLGTRNVKNEATGQWEKAPFYSVEDLFPYGHGEKSVFLIERFMKLKVEEAVAIRWHMGGFDDAARGGCFAISEAYDKYPLAVKLHIADLQATYLMEHRTSNMRMAEIKYEVVQRVAVLSQRPRGWERQLNLISWNDGEPKYDIRDWSPDGTRMGKGISLSHDELAILKGILEDMELMNSLEPFIRRELENQPGTAAAPQASSTRNAPPLGSMPLQPPAAPDTPGTQLPPPELPQPEKPGVPMTDGTPMACRQKNAAAFLAGDVQTSVMAHYAPGLFSTKQKLHSRHPAPDEDTAAVLELVEWREDAPYGMRPLRLTLSAFGPYAAETTLDLEKLGKGGLYLITGDTGAGKTTIFDAITYALYDHSSSGIREGSMLRCKYADDKTPTFVELEFEVHGVRYTVRRNPEYQRPKARGEGMTTEKADATLTYPDDRPPVTKAKDVTAAVQEIIGLDYNQFSQIVLIAQGQFTKLLNASTEERSRIFRKLFRTQRYAQLQERLQAEASALNQQRTAQNAKLDSLLGGLQFSPEDPDAEALRTLCAQTVPETALAMLDALAARQAAALEEAGTALQATEAQLDTVQQQLGAAAQAQRLAQQLAARQAELAAAKPALDAARAEAGRHAGDAAQLDALTAQVTQAQSALAAYDALDTLCRQQTEARDAARLAAAQAHKRRTQLDSLNAALAAAETELAALADADTRLLALQNRSAQLTQRGEALAKLEQRLADCQRQAKTAHKAQESYRTAAAAQDEARARRDALERAFLDAQAGLLAEGLTEGAPCPVCGSTHHPARALLPHTAPTQAQVEAARQAAAEADRQAQNASAAAQSALAAANEAKTSLRRDAETLLPERFTTPEGTVPLTFALMTNVLAEENAALQTAQTDCKAQCRQAEADCRRKAQLEADRQAKTRQRPALEQSASEADRSAAAQNASADALEGQIAERRAALPYPRRADAQAALDKLEADRSTLRTGMDTAQRKLKQAEQTVAAAEAAVEALTAQQTAAQKELPARSAEELTAQQTELTAARETLRSREKQLSAQLLPNRKTAAQYRAAAEARQALESRWQWVSALAATAGGTLTSKQKIKLEAYIQMNYLDRILRYANTRLMQMTAGQYELERIGAENQRSQSGLDLGVIDHYNGTRRSVKTLSGGESFKASLALALGLSDEVQSSAGGIRLDTLFLDEGFGSLDEESLELAIRVLSGLTEGDRLVGIISHVGALKDRIDRQVVVHKARTGGSTVELRVMRFLHLSDLHLGKRVCEFSMLEDQRYILEEILTLLDETPVDGVLLAGDLYDKPVPPAEAVRLLDWFLTQLAARKLPVFAISGNHDSADRVAFGSALLADSRVYVSPVFTGAPQPIPLQDTHGTVDVYLLPFLKPAMVRHVWPDEPIESYNDALACVLRHCTPAPGHRSVLVAHQFVAGAAACESEEPSVGGVDSVDAALFDAFDYVALGHLHSPQKVGRETLRYCGTPLKYSFSEAGQRKSATFVELGAKGEVHITTAPLTPRHELRGLRGSYMELTDRRCYEGTAVDDYLYITLTDEQDVPDALARLRVIYPNLMQLDYDNQRTRQQQEICAPERTESISPLEHLAAFYQLQNNQPLTAEQTAFCQELIEEIWKEGDTVMAIPGYYSLLQRGSSGPDVALVQTWLNGVRDACTWYDALKADGKFGASTQRAVQEFQLKNKMNMDGKVGQNTWNVLYTRYTAKHGLKVPYPGIVLHTGSSGGTVRLVQQKLNSLGERLKDDGKYGAATAAAVQRFQRRNSLTADGSVGYATWEKMFMLRWFSKPLSVRQMRLLCASLLAGFALCGALQGLCWGRTQLDAGAALCADTLRLHIRAASDAVADQSAKLRVRDAVLAVMQQCPAHSAPEARAWAAGQLLQFQLAAQRALAAQGIRTPVRVYLVNMYFPARRYPTGQLPAGRYDAVRIDIGSGGGRNWWCVLYPGLCSFAQGGYALPAENDLVCGQYILRFRLVDWAHRLTARRQTVLLAGMSMFNTGDILETIEMFTQDNLDVRTVTMGISLLDCIDPDPKKACENIYNKITTKAANLVSTVERISAEYGIPIINKRISVTPIAMLLGACPEADPVDFAKTLDAAGKKVGVNFVGGYSALVHKGFSAGDRRLIESIPRALAETDIVCSSVNIGATKAGLNMDAIKLMGEAVKKASELTADRQCIGAAKLVVFCNAPEDNPFMAGAFHGPGEPDCEIHVGVSGPGAVRAALARLPKDAPIDEVAELVKRTAFKITRVGQLVANLASKALGVPAGIIDLSLAPTPAIGDSVANILEEMGLETCGCCGTTACLALLNDAVKKGGVMASNHVGGLSGAFIPVSEDAGMIHAAEIGCLTIEKLEAMTAVCSVGIDMVIIPGDTTPAVISALIADEAAIGMVNSKTTAVRVIPAIGRKAGEVLDFGGLLGYGPIMPVNSHDPSVFINRGGRLPAPMQSLKNMKAFITVIGHDTVGVVAKVAGLCTELNINIEDVTQSILQGMFAMIMLVDLSNCNVDHDQLHKRTDALAAEMGMQINVTRQEVFDAMHTIMEQLLKILENNARLPVEDIATMLNKSPAEVAAMMDLARAQGIIKGYKTLVDWEKAKVNRVEAVIELNVSPKKSRGFDEIAATIAAFDEVESVLLMSGGYDLQLVIKGQTFQEIALFVAKRLSPLDDVLSTATHFVLRTYKKEGRLYQDEEIDERECTVLMDYDKLIAPAAKAMRPSGIRKFFDLAAEMPECISLGVGEPDFKTPWAVREAGIESLEHGRTRYTSNAGLKELRAEISRYLERRMNLRYDPMRQILVTVGGSEAIDMCIRTLVKPGDEVIIPEPCFVCYEPITTLSGGVPVHVACRQEDEFRLRAEALKAAITPKTKLVIMPFPNNPTGAVMEREDLEAVAEVLRGTDIMVLSDEIYAELNYGLRPHVSIATLPGMAERTIVVNGFSKSYAMTGWRLGYACGPEAVIKIMTKIHQSAIMSAPTTSQYAAITALKECDGEIDRMRDEYNMRRRLVVRSFNDMGLTCFEPRGAFYAFPCIKSTGMSSQEFCTKLLEQKHVAIIPGDAFGASGEGYCRVSYAYSVEHLTEALKRIREFLVENNIYHGNMERRERKNAVTVLAPAKLNLALDVVGLLPNGYHALDMTMQTITLYERVMLRRSAGLSLRLPGSLVQPNDKNTAIKAALAFFHYTGLLAGVDITIYKNTPVRAGMAGGSADAAAVLVGLNALYGARLSMSELCALGAGIGADVPFALMGGTCRVQGVGDLLKALPPVPDCWFTVVMPDYGVSTPEAFAAYDTVGSSTHPDCEAQEKAIRAGDLDAVCAAAGNALEECSGAKDNEAIKTLLRAHGAVTALMTGSGAAVFGVFRDEAAARAAAAAAKRQWPQVYVAKPDRGGARVILMQTFYKICLLLLIVGGVNWGLVGLFQFDLVGWLLGGSTSVWSRIVFALVGLAALGCIPELFSEEPEEEMSSEHLVGTSIPRFTFDTPTTPGNDFYALCAGTEPLCMIFLPGFDHPVTREYLTRYLKTLPRLRGVRLACVVRSAPRAVAEATQGKEFPFPIICDAPGVLYSYLGVEQARGLLSWSFSAQRIYKSARDAGYHYDRNAPQILPMTLIVGHEGKILFTHSGRSQTDLPEDCIAIRELAREVVHTKAADQRRASHHCSDETLTLPDLIGWDDVDNDQMSDEIKNPNTEEEYQPDLMTLEDEDGNEVTFEVIDALDHKGVHYLAVVEYAENEEDLNEDAQLVILSVGEDDEGEYLDVVEDDEVLMEVSKLFEQRLSEDYDIEMLKKFGAVCLAAVLLLTGCTLRPQENGSKVQSISRPAVESAELQFTHPAAGDTVAVFDTSAGVFRAVLFPEKAPQACDNFIGLVQQGYYNGLTVSRVENQFVVEAGQGADGKGSTIWKGSRYPVEASDSLHHYAGALCMGVDASGACASVFYVVESLPGEQSVTQELADQMNAAGYRAEVVSAYQTAGGAPYLDYTDTVFGQVYEGMDIVDTIAQTAVDENQKPTTDITINSVSIETYQGMKILAVDYGDSRTGLATCDRTEFLTTAITPQITLKARNKVAARVCEVAKEIEAEMILIGLPLNMDGTEGERAAKSRKLAKTVELWSGLPVRMWDERQTTCAAADLLDESGTYGSRRKEILDSVSATVILEDYLAWRKEHPGEMMLKLVLGTSGSGKTTLLYARIRARAEAGKRSILLVPEQFTSSTEARIYRELGDALSGMVESYSFTSLAEHILAIEGGAAVQTLTDAGRAVLVRRALEELQDNVHYYYRHRRSAAFCQMAAETIDELKSAGLSGQQLQELARDCGTESAKLGELALIFQGYESLLAGTGMDPADRLELAADRLEAALARDELPDFLREREVFIDEFDTFNAPKKRLMGAMLAALPAVTVALCEDGAPMQPGDLELFSGAKQVAAQLRQLARKNGAQVAAPELLRRDLRHKDAPGLAALTELLETGSCTPPESAPELRLFAAASREEEARCAAAAIRRLMRQGVRCGKIAVVCRDISLYRAAVRYEFRMAEIPLYCDEPTTPEFSAPATAVRALLALLRGADMTEQLTVLAKTGLCDLTEPEVCALENYAYTWSPNAAAWRAEFTKSPRGFGDAELTEEDTLNMTRAENARKKLVTAVDTLRSKVRSANAEQISRALYFCLKELGAEEQQAAQVEDIRTARGIPAAEEAAREWNVVMQLLDEMARLLGSQGITVPEYEDLFGLLLRSSDLGHIPQTLDAVVLASAGKMRLDAPDYVFVLGLAEGEFPCTPAESGLLTHADRDLLMAKQIDLPDCFENRVVREQVCFYKALTAPAKGLWMSWPKGQGQTLCAALEPIVEALQPAAPQLELIDLAATPADGLDVLGGGWPLTELERASLTEALRTPGEGVQAPRGLALLQRMEQDPPRQVQDLPTLETLLGRRLHISPSQLEKYYTCRYGYFLQYVLGLKPRRRAELSADQSGTLMHWVLQMALDPHPGADNPCAGLRPFLELDDAAMADLAAALVDEYARRYLPEDTARFAYLLSRLKKSMTSLLCYLRDEQNQSQFKPVACELKIGRGEDAVPGQVYRLSDGRTVQLVGTVDRADEWIEDDGTRWVRVVDYKTGSKKLDLKEVYCGLDCQMLLYLFSLTRDAGGRFTGAQPAGVLYLLADPAPQTLPRGQAARAVEYQLDGLVRDEQKIFDAMDADETGKYLPFGYRNGAPSPYQKDKRADSAKLSRIQLHLDDLVTQMGEQLYGGQIDAEPLVVSSSKSPCTWCDYSFICCHETGVHERALEAPAKPFEPEEEPEEEEEQPMSGPKWTPAQQAAIADRGGALLVSAAAGSGKTAVLTERAVQLITDPEHPVNADRLLIVTFTNAAAAELRARIGQALLHRSQLQPGNAMLRRQRMLLQRAPICTIDAFCLSLLHKHFQALDIPPDFAPADPGTVQLLRGAALAETLENAYRDPDFCAFADLYGKGRTDKPAGDAILQIYDFLRALPDYDRKLDEFLAPYEQENGFAATCWHDLLLAEAARCAKAARELLTAALADCRADFAQEQAAAEEKKTPSARAKAQAAVAEKYEEAGTRLEKAAAFFAQAEQLATAGQWDPLYDLLTPYVLGMEEAPGLKGMKKRLGGDHKAEIKTRSDEAAALFEQMTQLICCSEAEAETDRQITLPRLRALFAAVRDFDARFTARKRERKLLEFSDFEHLALRLLRTPEGKPTPLCENIRQDYAAVMVDEYQDTNALQDALYRCLAAPAGDNLFLVGDLKQSIYRFRQAEPGIFRQKLDSWPLLPGAKARPRPPEGTPGTDALLALDANFRSAPQVVAGINYLFEQLMTPELGDTAYGDGQRLVCGAPGEYQGSVEVQFLPDDETETDAGWIAERIEQLVSAGEPVREGSTTRPVRYEDCCVLLAARTEFPAYVEALTARGIPVYADARENLMLAPHIRPLIALLKVIDDPSQDIYLAAAMLGPMFGFTEDDLVRLRARSRQVQAEPDKKPARISLYGALLLALEDPADDPFTEKVKDFYAHLTALRQMARSAPAEQLLEEIFASTGYLAALGVLENGARRREDARRFASFCATSGTGGISALVRAIDAAAQAGSTGQDTVPSGVHPGCVSIMTIHRSKGLQFPVVFVGDTARKFNASDIRQPVLVHRSYGAGLRLRPENGEGAYKTAAYTALAAVHARELRSEQMRLLYVALTRAQDKLILTVPLSSGKTAKPFAKAAAFLAAGAGATLHQQANSFADWLRAALLVHPDGGVLRQLSGNRELLFVQTESVMNIKVCDEAVRLSEKPDADTADEAPETDLALVEKLRQGFAWQYPAAALAQVPAKVSVTSIVHKAEQTTLERPGFLSKDGLTAAEMGTALHAFLEHADFARLAAAKAAGTLDTAIPAERDRQVAVQLTAPEIAEKLDAVCIRRFVESEAFAKICAAQQVLRELPFITALPAGAVLAAQGHEELPAAADAQVLVQGIADLVLVYPDHLELLDYKTDRRKAESDFLRAYRAQLNLYAIAIEKRFAPKKVTYKGIYSFALGKLIEAMPNIATLWILFGGAFIIATAGKSKELEINGQIRDREVRLIGADGEQKGVVSIQVAMRAAEEAGLDLVKIAPQAVPPVCKVLDYGKYRFEQQKKEKEAKKNQKVVEVKETRLSLNIDTNDFNTKLNQTAKFLAAGHKVKVSIRFRGREMAHSALGADVLKRFAEALPQASTDKPPVLEGRTMSILLIPKPNKDMAKMKLKTHSGAKKRFKLTKNGKIKRGHAFRSHILTKKTTKLTRGYRQPSYVDKTNAATIKSMLPYAMARIKGATMTHKRRKKMLKLAKGFYGCKSKHFKMAKQQVMKSGNYALAGRRMKKRQFRNLWICRINNAVRPLGMNYSTFMAGLKKAGIELNRKMLSEMAINDPKSFAALVETVKNAMDEKITSRENAKIKYACRLASGAAFRRTEGRFLAEGRKLCPELARGAELETLFYTENALEKCPELAALPGEHYLVEDHVADKLADVGTHQGVFGVFRTPVHTLEEVRPGGRYLALERVQDPGNVGTLLRSAAAFGFDGVILSEGCASVYAPKTLRASMGAAVRIPVIETGAMPQAIALLREKGITCLAAALYQSQPLSAAKAGYPGGVCVVIGSEGQGLTDETIAACNSTVRIPMTDRVESLNAGIAGSILLWHFREESLMTGQTSLFPPEPAPDPLLCWLWLSQVLGPASLHAGKVLDAFGGAQEAWEARETEEFRQAAGDTAFKRAAQLDAENCHTLVMQCDALRVRILPFDDPDYPLAFSRIPDMPLVLYCTGDPHWLNEPGAVGIVGSRKPTEYGLNAAADIGGELAKNGAVIVSGLADGLDSAGHRAAVKNDCPTIAVMGVPIDRTYPAANAALRQQIERKGCVISEYPPYSEYIGPTCFLQRNRLIAALSSAVLVVEAREKSGTMSTVAHAERYGKPVYAVPGSIYSPNSAGTNGLLRDGRARVVAGAADLLAALGLHTRQAAPAAAKQPAPLSDTERRVLAGIGPKPVGIEELCVSTGLPMSALLGTLMKLELTGRVYKQPGQRYVLRMAKLVIVESPAKAKTIGKYLGDDYEVTASMGHIRDLPASQLGIDVEHGYTPQYISIKGKEKLIKELKSKAKHADGVLLATDPDREGEAISWHLANILGLDPHEPNRVTFDEITKKGVKEGMAHPRAIDEDLFNAQQARRVLDRLVGYKLSPFLWRKVRRGLSAGRVQSVAVRLIDDREKEIENFKPDEYWNVDATLGAGHKSFVARLATDANGKKLLPKSEAEARAIEKGLEGASYVVSELKRGKRAKQPTPAFITSTLQQEASRRLGFTATRTMRAAQTLYEGVDIAGHGMMGLITYMRTDSLRISDEAVAAAKEYIAGAYGEAYICPYKRTWKTKSATAAQDAHEAIRPSVPSLTPDEVDKSISGDTAKLYRMIWSRFMASQMADCQQDTVSVTVSAANYHFKASGYTVTFDGFTALYEEATDEKEKKETNLPPLEQGQVLKLRELKSEQKFTQPPARYTEATLIKALEENGIGRPSTYAPIITTIIDRGYVERDQKKLKPTLLGRAVDGLMLEQFPHIVDVDFSAQMEKNLDKVESGKADWRKTVDDFYQGFEASLEQAEKNMEGKKVKVPDEPSSEVCDLCGRPMVIKVGKYGKFLACSGFPECRGTKRLVKDTGGICPKCGKGRLLERKSSKGRIYYGCERYPDCDFMTWDMPVATKCEKCGSTLFRKGGKLYCAKEGCGFEMPVPKKDMNEYKVTILGAGLAGCEAALWLAGKGVQVELYEQKPVHFSPAHKSEGFAELICSNSLKAERLDSASGLLKEEMRRMGSRLLTAAEETRVAAGGALAVDRDAFSAAVTRMVEACENITVHREQVETIDESAPILVSTGPLTDGALADEIGRLTGDERLHFYDAVAPIVTAESLDYSKVFAASRYDRGEADYLNCPFNKAEYEAFHAALASAERAPLHDFDTGAEQSAKPDPDAHGKKADTVTVYEGCMPIEIMAARGADTMRFGPLRPVGLVDPNTGHRPWANVQLRAENKERTLYNIVGFQTNLKWGEQKRVFSMIPGLENAEFVRYGVMHRNTFLDAPRVLSAQLCLKEHPNVFFAGQITGFEGYMESAACGLLAARNLYARLEGKQLPPPPADTMCGALVQYLTTENKNFQPMGANMGILPPLPAETRPRDKRLRYMAQAERAVASFQHWLEETALMKIIVDMMGGDNAPLAVLEGAAQAVKEYGVQLIGVGNEALVRKTAAEHNIPLDGIELVNCTETIEMCDEPARAIRQKKDSSIVVGLNMLKEGKGDAFVSAGSTGALHVGASLIVRTLRGVKRPALATMVPAKQQAYLLLDCGANVECRPEMLTAFAVMGSCYVNKVEGRKNPSVALANNGAEESKGTPVLRDAHQLLKTTPGIRFVGNIEPRDVPNGEVDVVVCDGFTGNVILKLTEGVAKMLLGMLKQMFLANLGGKLAYLLLKGGVTDLKHQMDSEEYGGAPFLGAKQPVIKAHGSSKAKGIKNAIRQAKICVENDLCGTMQSALDELAAAQKTEEMSHQLETIIGYKFKNPELLEIALTHTSYANESRTPVKHNERLEFLGDSVLQIVSADYLFHAYADRPEGDLTRIRASLVSESALFQFAQEIDLGEYLRLGRGEERCGGRTRPSVVSDAFEAVIAALYLDGGMEVARKFILPFITEGKHAEADYKTRLQEIVQQNPEERLSYVVESESGPDHDKHFVVAVRFNSDRVARGEGRSKKAAEQCAAKEALKLLGVIKEKMVFKELEIQGFKSFPDKVKISFDTGVTGVVGPNGSGKSNLSDAVRWVLGETSSRQLRAAGKMEDVIFGGTRKRSPMGFAQVRLTLDNAAHTLDVDADEVTIGRKYYRSGDSEYTINGQVCRLRDVYELLLDTGIGRDGYSVIGQGRIAEIVAAKSSERREIFEEACGIAKYRYRKTEAERRLAAAGENLERLRDILGELESRVGPLEKESAKAQKFLELSAQRKTLEVTLWTDGVHRAREAVRQQVRDYETAQTDYERFDRETKAAEQEAEEIRMQAQQLTVAVERLNGDIRSITQQISGSESRIAVLENDILRNDESAASLQQEIAAGQQDTAEADAALQRHRAVAKTMEAAGEKLAAEIEALNAELARLADASTASGARKDSLRAELADHTAKRTEAQVAQAAAEAAGDTARQRLPALEQSARDAAAQLEETKQDLADTVKYRRTLEENEKQLGNIRSGLELKLRSRKAALDEADAAEQRLGRELDAARQRLSVLRELEKNMDGYQNSVRAVMRAAGARRLRGVLGPVSTILKVEPGCEVAIETALGGALQNIVVENEAAAKAAIALLRNDHAGRATFLPLDTVQPGVFRGRLSGTARLASALVQADPRYENIVSNLLGRIIVVEDINEASRVARDNGYHNKVVTMDGQVINAGGSFTGGSVQRSAGLFTRKQEMEELRLKAAKLQKDCLAAQEKTDQCKEQADALQAELTATASEQITAANDRVRAEAEQKRLEAAAAQLETAVQNAQQQMDALQAALNDSRAKADTAALQQAELTAQIEQLTAELSRIAEGSDSFLTQQNQLAQALSAKRLEQVTRRKDAELAYSQIAALEQRAKDAAARRTALEESLAALAARSEACRTEIAAIRKAKTDSQTTITQKEQAIREATEKRLACQQKETEALAKARTASDSREEMGREMARLAERKAAAETEYDQTVAKLWDEYQLSVSQAEELCVEFDSLPALRAQVADLRGKIRALGSVNVSAIEEYKEVKARYDDLSRQVTDVEESRNELSRMIAKLSAQMREIFTDSFRAINENFSRVFTELFGGGEASLVLEDESDVLACGIGIRVAPPGKVIKNLEALSGGEQALVAISIYFAILAVNPAPFCILDEIEAALDDANVVRFAQYLRRISDKTQFIVITHRRGTMEAANVLYGVTMQEDGVSKLLKLDLEQVDATLVSMAFFGFGKKEKDKMKTGLEKTRTGFWGSIMNTLTGSVIDDEMYDDLEEKLILADVGGEVAVHLVDKLRDRVRDKGLKTGEQAADALRDIIAEEMTPEAEMALDGKPAVILVIGVNGVGKTTSIAKLADYYTRQGKRVMLAAGDTFRAAASEQLEIWASRAGVPIVSAGEGADPAAVIFDTVKSATARGYDMVIADTAGRLHNKSNLMAELSKISRSVKKASPEASLETLLVLDAITGQNAISQAKEFCKAADATGIILTKLDGTAKGGCVVAVKQRLGLPVRFIGVGEGIDDLLPFTPEGFVEELLPREWKHMKICAATGNAGKLRELRRILEAQGHEVVSQKELGITIEPEETGTTFEENALIKAETICKASGLPTIADDSGLCVDALDGAPGVYSARYCGHHGDDEANNDKLLAAMQAVPAGQRGAKFVSAVCFILPDGRHLTCMGECPGSIAFTRLCGDYGFGYDPLFIPADCGVGKTDKRPNTENRSYAQLTPDEKDAISHRGNALAALEKQLPSFLSAVTEEGVIAQVSGKVEIKLKMLTSKQRAILRGKANTMDPVYIVGKGEIDETLIQGVKDCLDARELIKLKVLENSMYNAREAATKLAEATGADCVQVIGSKFVLYLQKKKDSAYAALLKMKILLYGGSFDPPHNGHLNNLRAAADRVRPDKIVVMPAGTSPFKEGTNASGALRLEMCRCFAALAQEPGMPPLEVSGWEVAQAAAGSRNYTVLTLEMLARENPGAILYLAIGSDMLLSFEGWHRWQDILRIARVVVTSRDIGDAPALHAKAKQLDPSGGRILFAPVQALPMASSQLRARLAAGEECEAELPEAVRSVIRREGLYRNTEGSSRMELKQAKELVRGRLSDKRYEHTINVKKMAVKLAKHYGTDPEQAALAALLHDAAKELPKDEMRAIMQAYPQYAQGGEARPTPVWHGICAAILARTEWGVTDEAVLSAIACHTAGKAGMTQLDKILYLADMTSAERDWPGVEKLRKLEMKDLDAAMLAALKQTNGFVLSEGKPLDPESKAAYEDILAHSGQNEGMKSRMPIKNGSGHPRIKQLQILPYHAILKDMTGLQVKNSAEQMSQTPRHINTDSSLSRPGQAARAPQAAPEQNTRSTAGAQHAPPPRRPAQPDMGGNGAPRRRKKKKKTPLWLPFAIVMGVIAVISGVVVYGVSLVNKVEDSIRPAESAPSIVQEIQTAEEYKGDVVNILVCGIDFEEGRSYSDASSNDGMTDMILYCQFDIKGGALRMLQIPRNTLVTTQNRKLTLSNGKTYAVSNYQINSVALSNGGSIAALADVIYDQYHLPIDYYVTIDMQALVEMVDNFGGIEVYIPRDMSYGGSKLLKGYRNLDGASAEFFVRCRHGDGYANSDIDRLNMQRYFYAGLFKRARAMGITDILNQLPLIFKDYIHTDMDITTIAKLLASFLKIDSSNIILAQTPVFMGVPNVGKTDSFAGYSCVVPDAGSIANLLNQYFCTYTGPVEVSELHMVTDQWPHGSASTDANVQYMGRIDKESDDAILSGDTDLSGAVTTDGQAAGTGQMDNFNDSKALAIEIAKILDKKKAQDVRVLKVESLTVLTDYFVIASGTSTTQVASLADEVEYELSQKGLEPYSTEGHDTKNWVLLDYSNVIVHVFVPNSRAYYDLEHLWADGEPVDISEYLTPDSSIEMKYDYKAVEAKWQKVWEDEKTFHVEIDHKKPKFYALVEFPYPSGAGLHVGHPRSYTALDVVSRKRRKNGYNVLYPMGWDAFGLPTENFAMKNHIHPAIVTKSNVDHFRSQLKALGFSFDWDREINTTDPEYYKWTQWIFLQLYKHGLAYKKEMNVNWCTGCKCVLANEEVVNGVCERCGSEVVHRVKSQWMLKITAYADKLIDGLDGLDYIERVATQQKNWIGRSHGAEVNFGTTAGDTLTVYTTRCDTLFGATYMVISPEHALLKTWLEKGIIKNADAVKAYQAEAARKSDFERSELNKEKTGVQLDGVMGINPVNETEIPIFISDYVLSTYGTGAIMAVPAHDTRDWEFAKKFGLPIIEVVKGSTPSNLDEAAFTDVATGTLVNSGFLNGLSVVDAKKKMITWLEENGKGRDKVNYKLRDWVFSRQRYWGEPIPMVHCDKCGWQPLPESSLPLTLPDITDFEPGPDGESPLARHKDWVKTTCPCCGGPATRETDTMPQWAGSSWYFLRYMDPHCKDALASKEALEYWSPVDWYNGGMEHTTLHLLYSRFWHKFLYDIGVVPTAEPYQKRTAHGMILGLNPHSFVNLPAEEQEKLLKEYGSQKAAEKALEEKYGEMARHPIVKMSKSLGNVINPDEVVDQYGADTMRLYEMFMGDFEQAAPWQTSAIAGCNRFLDRVWALSDKLVEGEGYRPAMETLMHQTIKKVSADIEGLKMNTAIAQLMTLVNALYDNGGATKAEFETLVQLLNPFAPHMTEELWEKLGHSHDEQLAYYPWPAYEEAKCVEAAVEIAVQVNGKVKARLKVPADITAEDAIAAAKADPAVAAALEGKQLVKEIYVKGRLVNLAAKGMSEIRVKEGESLESALRRFKRSTARSGVLAEVRKREAYEKPSVKRKKKSEAARKRKFKMLITPEYVFKDVTHITPEWLAAKGITALVLDIDNTLTADRSQELPEEVAAWLAAMRKAGVKLTIVSNGAEKRVRPFAEKLGLAYLYRAAKPLPFALMVAQHRMGVKHRQMAMVGDQLYADRMVAALYGIPGLMVIPRGPDLGAQVILKRKWEKKHWKKYYDRGGKTLMSEAWNIRFGTAGTSDSFAAQGYKSSLDVPEYTAKMGLNAFEYQCGRGVRLGLDKAARMAALAAQRDILFSVHAPYYISMSSLEEDKRLNSIQYLLQSAAVCRALGGRRIIFHSGSCGKQSREAALEKALDTMRRAVAALDEAGFEDMTLCPETMGKVGQLGTLDEVLALCGVDSRITPCIDFGHLNARTLGGIQTKADYAAILDRMAEVLGDDRARQFHVHFSRIEYSAGGEKRHWTFADTQFGPEPQPLMELLAERQLTPVVICESAGTQAEDAQTMQQMYRAARNVMISAGEFRNGVTFEQDGQVLQVVEFQHVKPGKGAAFVRTKTKNVITGSVVETSYNPTAKFPQAFIERKDVTYSYEDGDLYHFMDNETYDDIPVNAADVPDNFKFCKENELCKLLSYKGKVFSVEIPNFIELEVTQTEPGVKGNTATNTLKPATVETGAEIRVPLFINEGDHIRIDTRTGEYMERVMELNKKAAYLQGLVDGLGVDESTKEGKIIKAMAALLGEMADAIAAMDEDLTQAYDQINDLSEELEDLEADLYEDEDAEDEDDDAADEDEDAGDDDIASEPFYEVACPACGETVYVSEDDLDAGEANCAHCGVTFEVALEGDEDEAKDAPVQYEVTCPACGKTAVFEEDELLDGAPKCPNCGEPLDFEVTEEMAYTPKLTYKGKPLVRKDNELYYGSMTDPYVLYLQILTTTPVGEQQVADKVHLMLLSTDTTKAPQERVARQTTKHGLYNALDIGGIWLQKANENRMRQSTVCFAPKQPRTVQNRQHIFGKWGLLLGAVMLYYKMADYQEYRRRILHRRWRRVFIIVALLALVALLSAIGILWKVLHRERVDTALSQNTILRQVTTDNTWNTISYPLARQLRVQTLEGSTETALDFRMAALPASAPVEKSWFAQASFVGDSLTQGLQIYDTGLPGAQFCAYKGVGPNAFVNGTSCKRADGVTEIPLDALTAQQPKAVYVLLGSNVLGQDTDYTSFLTYYRLMLDMISQALPDTKIYVQSITPVRPEVSAQANHAGLNRDRLCHINNELAAIALEKNCYFLNLWEVLADENGDLIESYAQPDGYHIKPEGYAVWVDYLCSHTMEMKTDIEIAQEAKMKPITQIAAQLGLEEESVIPYGRYKAKIDHRLIHNAKKQGKLILVTAISPTPAGEGKTTTSVGLADAMNALGKKTMLCLREPSLGPVFGVKGGAAGGGYAQVVPMEDINLHFTGDLHAIGTANNLLAAMIDNSIQQGNPLNIDPRRITWKRCMDMNDRQLRFIVDGLGGKVNGTPREDGFDITVASEVMAIFCLATSISDLKERLSRIVCAYTYDGKPVTAGEIGAAGAMTALLKDALDPNLVQTLENNPAIIHGGPFANIAHGCNSVLATKLSLSLADYTITEAGFGADLGAEKFLDIKCRYAGIAPSACVLVATVRALKSHGGVAKADLNRPNLEAVKAGASNLIRHIDNLKNGFGLPVVVAINAFPTDTAEEQAYVEQVCAEQGVPCVLSEVFAKGGEGGKALAEKVLEILEDRPIQYTYPLEMPLKDKINAIATKIYRADGVNYSTAASKTLAELTEMGYGNLPVCIAKTQYSFSDNAKLTGAPTGFTMEVREVRLAAGAGFVVVICGNIMTMPGLPKKPAAVNIDVDADGKITGLFMLQNPQLHYLDNAATTIVAPEVADVINKAMREHWANPSSLYGPGARSEEALNAARAAVARTLGCKSRELYFTSCGSESNNLALLGAVQTRTFGKGIVVSGFEHPSVQRPLERLAKQGYDVTVVAPRADGTLDIAAMLERVDKNTILVVCMMVNNEIGTRNDVERLAAEVKRRNSRTIVHVDAVQAWMRVPIKLDNIDTLSVSGHKIHAPKGIGALYLSDRLVQAFQPPYLGGEQERQMRPGTENLPYAMGLAAAATRLAKTMKSRDTAMRALNRQLREGLKAFPEVVINSPENAVPEVLNFSEMCIKSETMLAFLAEEQIYVSSASACGRGQPSHTLAAMGRDPLAIDTAIRVSFCADNTPEDVDAFLNRFEDGMKHLQKIRKMGYQGEMSLKGLNRNQFEAAMMKILRYRLKTVGKFKVYCTQSTFYMEPEEEDVDMDLAFERVSKVFGLAALSRAVVCEKDFDTICQTAEDYLGSALHGIRTFKVEARRADKTYPMTSPELMRELGAYLLGKHNYLKVDVHNPQFKVIVEIRDYGAYIHGPKIPGEGGLPVGTSGRALNMLSGGIDSPVAAYRMAKRGLALDHIHFASPPYTSERAKLKVKALAQLITVYTGSANLFVVPYTKPQEYIRDNAPDVLFTVLMRRSMMRIANVIAKKQGCEALVTGESLAQVASQTVKALQCTDAAQDLPILRPLIGMDKTEIIETSRHINTFETSILPYEDCCTIFTPPHPKIRPELEEILAAEAAMPGLAALEAEAAEQTERIRVRITDQVEFEGMTAEIISVGTELLLGNILNTNAQYLSRELAALGITVRRQSTIGDNHGRLADFVNEAKQRCDLLVFTGGLGPTADDLTKETVAACFGDTLTFDPEEWQKIVDFFTRTGRETTPNNRKQAMVPVHGHKVVNHHGTAPGAWFEQDGRCAVLMPGVPHEMKAMWEESVRPLLLARQSYALHSLTLRVLGGESNLEYRVRALLENPNPTAAIYCKTGECEIRITARAQNDAEAQSMCRAYAKKFYDLLGDAVYDEDVAGLEETVVHTLQANGLTIATAESCTGGMIAQRLTSVSGASEVFGYGFVTYWEQAKAKLVGVDPAVIAQYNVVSAPVAAQMALGAAKAAGADIAVSVTGLAGPGGGDAVRPVGTVYLGAARGDRVYVKKLFVSRPDRALIRARAAQTALEMALRLAQGKAPAGTQVLPESAQHDPAALTALDETLRAEMTNKEERPAGCVLRLFGAPEQTVQKAVEALPDTWQGTVHCRSRGAETLVALQSSTPQQLHRAVQQLRTSLAPALYGEGEQTLAAAAVQALEQHRKLLVCSDTAAGALLETRLENLPGAEKVFDFGAMSYANTALTARLSRKLRKAPQAEPARTLARVQVMQKLTGAALTVGCVELPQSRLLLVGGKKGCWLRCLASDENPGLWLLDMLRRAACGLPQAGGTNWQPYGRAVPDAALTPASLTAEQSASPRPKRRRLGKALVVLLLLALAALAAGWYYTGGDLAALPQKLQSLGAESLPHAGAKLVMFSIEKDQSFLRENSGLCNSANGNAHCLVKGRGLWYSYGSKGTGCKELCVILGVCDGKEIMEKKFNIVVGEDGTVKLPEAVLEKLEVKPGEEVRFEVDDNFYAVRLLSRIEAERLDYLNWMHNKHCPSIEEMIAESRKQATQNIVISRILDGMPAEKIAEGYEVSLDYVKQLTHQLKMDIEEAKTKKHKETGSSMASIVKRNNRYCVVYTYKHTNGTLKQKWETFTDLADAKNRKKEVEYKESVGTFVAPQCRTLKDLLKEYVTLYGRTKWALSTYQSNTALISNYIEPLIGSMKLQDLTTRVIEGYYQRLLKYEAVDPMCGKRQHQYVSPGTVRSVHKILRSAFEQAVKWELMEKNPCIYATLPKYTAKKRDIWTAETLFHALEVCDDPRLRLCINLSFSCSLRLGELLGLTWDCVDISPESIEAGRASIYINKELQRVDIASLNALENKNVITRFPSLSSRCTTVQVLKSPKTDSSIRTIFLPKTVAEMLVHYKAEQDMTKDALGAEYADYNLVVAGPLGMPTEQSTINGALKQLIEENDLPKVVFHSFRHSSITYKLKLNGGDIKAVQGDSGHAQASMVTEQYAHILDDDRRLNAQRFDDFFYQHHGAEPEALPRAEQSTPKASPVDTDAVAALAKLLADPSMATLIKNLAKNLMDDMRNTSAPLYGKAEPATTKTTMSVREMRQLLGLGKTDSYWLLHKNLFEVILINEKRRIVISSFEKWYTNQVKYHKVNGPPPGEELCKRSYSVPDAAEILKVKPETIYTLIRQGKLKTETTDFCMRIPKEEFERWYRSQSRYRTAADRERDREIEAQTISIPEMAKLLGIPRKNVYGILDCKKYRDCFVIERMADRPRITKKSFKAWLKSQSTYQLQKPKKETHEEPPLKLQCPKNGKYYSFQEIQAFYGISRPTLDSWVLKEGIPTMKLGRVKRIQKDAFDEVLKSKRKVEEDVMIIHEDPSPNSVSSPVSTAKDSRCYTVEDLMEMLLLSRPTVYRLLKQNEFRWFKVSGAYRISKASFEAWLNDGTVERNPAVMMNAVVKPYHEMCLNSSELIVPRDTYQRALHPARVARIAKEFDERVANEPKISFRDGHYYVMDGQNTIAARKFLNGGEDLQIRCKVYFGMTEREEALLFAQQTGISERLSAGQKLRALIFAGEPAAVAFQQATELAGVHLSFEEGRGKQRISCIATAYHEFIRLGPELYIESLDVLLNAWNGEPDSMSSANLLGICRFVELYHSEYNKGRLIAKLRQVDAFTIFRLARTAGVSLPGKTKYLQQVYTIYNGGSRRAALPLKFMATRGKKEKKYPPMPANWMYKRGDVYMMDLNPYSGSEQGGIRPAIVVQNDDGNFYSNVLLVVPLTTQIKKRNMPTHFILHNRFLSAPSMAICESPRPADKSRVLSYLGHLSKYEMRQVSVCLQYSFGFIGYKSFRKYLTAPPQEDVLAAAKELLSQQFQNLRVLNSQPPALAKHTKGDLHSIEQISERMLSTPAESSVEFMVAELDDALQSLMFRWNICYERYSSFHLSDNEKKKIGLIIQSGIDFLQKKKEVPLMSFDPNAIGNRIFTLRTNAKLSQEKLAEKLGVSHRHLGDLERGSSNGSVKILIDIAEYFHVSMDYLLLGRDPSRDQFQNELQAAIDHLEKIKGLLMARYLSRAELSCIAGKYIEMYYALFGISKNDPAPINPEQFANSVLGLNLKMLPLCSDGHILGLTVFQRCSFTATLEDGTKLVEVFMPRDIVIDSALAADRCTGCRNFTITHEAAHQILADLFPNDYGKAVKCRGHIAYRERNGKASWEEWQADTLAAELLMPTFLINAEIERVALTLPNGILYKSVSDPNYEKFLEMARRIGVSWSAIRIRLQQMQVIKGKPIHCHPLDIMRFGEMCGDYNLRREKRYVGVDVRFTPDGKIRPLAINYDKTRTYGIDRVLAVKHGTSRFGVKGHCFTCLICGQKRNLWLEKGKWFVEAYCATSEGRASMRKENVRCPMCGTMNYDVDLDETGGWTKCRLCKAVTCSMEEWKKHTVSVPVLSEKQLVARSMIRKMKKKTTLTKMHIAPSTVRYDAVAARDSNEVGQILAGTRKRNGYSLVAFSELLRHYGVDVSDKGISKWEKGYTTPSIYQLVAICYALNIKEGPSYFTKNFQKPALLNDIGQKKVAEYEMDLIASRRYQPDTEEPAEIDCIMMPVSELPVSAGLGAFLEGEMFQQIQVPASSVPAGAEFGIYVSGDSMEPRYHSGQIVWVKRCEELECGDIGIFVYDDCGYLKKYDEHTPDKSQAELLTDSYGVVHNQPVLVSLNTKYSPILISPEQRFEIVGKVLNMNKLISCHYNMDTNRVEARFEDGTTLAIDCIAVEDEYGNTPAQRAELDWLLYNKPLEYAQMVLRGEIEHYLSLGCDHGRLEDMTNKNTRQILYEKSAGYRPDALGAFHSEKLQGKCKLCMKQDTLEGKAKTKNGVKRLCFSIICILLEVFFIITIVTRLNEYAEVINLFTRILSGILVLGLYASNKTSSMKMPWVILILIFPIMGVGLYLLIGLNGGTHKMRERYAEIDSKLLPMLPDSQECLSRIKETIPKAGNIASYIQRNSQYPIYQNTDIVYFDEAVKGLEAQLKDLEKAQKFIFMEYHAIEDAEAWHKIQDVLEERVKAGVEVRVFYDDMGSIGFINTDFVKKMETIGIHCRVFNPFMPGLNLFLNNRDHRKITVIDGKVGFTGGYNLANEYFNYTHPYGQWKDTGIRLEGDAVQSLTVTFLEMWNAVSEKATNDTDFSKYIIHYDYKAQQTGFVQPYADSPMDNEQVGEEVYISMINKAEKYCWFMTPYLIITDEMTHALCLAAKRGVDVRIITPGIPDKKFIYSVTRSFYHGLVKHGVRVYEWTPGFCHAKMSVADDCMATCGTINLDYRSLYHHFENGCFMADCQAVVEIKNDLIRTMGECRDVTDQYQTGRSAYLRLGQLFMRLFAGLLMKKHKICKILLVILAIFLCVAFYELLGICVAYKKQPEVSNTTKKETKNGSWNECSENTERAVIIEKNPEALLQRVRLIKNAKKEIILSTFAFQSDESGKLILGALHDAADRGVHIRLLVDGMESWIDMEGNPYFYGLSSHENVEIKLYNKANPLKPWKIMGRMHDKYLIADGKRYILGGRNTYNYFLGDFPGHKNYDRDVLVVCDEPEKENSVNQLLEYFETIWEQEDSDYFHDNKKLANRKSVKNAVLELQNGYQKYFEKNKERICDTDYTDETFETEKIALVSNPIHTGSKEPVVWYQLGELMKNAKNRVKIHTPYIICNDMMYNTWEEIAENVSDFSIMTNSVANNGNPFGAADYAKNRNRILSTGINIWEYEGGYSYHGKSILIDDDLSVIGSFNMDMRSAYLDTELMLVIRSKDINKQLEEGMMEYERVSRQVLEDGTYRDPYHVEPIELTKKRQRKIFLVQHLLGWARYLFMFQILIVEDDKELSQLFQKVLEKNGYQVKSASDGAQALEVLVKEYIDLIISDIMMPVMDGYELVSELRSAGYQIPVLMITAKGSFDDMRQGFLSGSDDYMVKPVNVNEMVLRVGALLRRAQILNEHKIVIGSTEFDYDAMTVTTDKESLVLPKKEFLLLYKLAASPGRIFTKQQLMDEVWGYETEADPHTIEVHIGRIRERLKDNPDFEIVTMRGIGYKVVKKMEQKKEKGLRIRSCLTGAIWLALVFSTVISALLFAFLNHFFNLPGSIPVLGWLLIFNTLIAGLITSFINAKLLEPITRLSKAMKEVSRGDFEQHLETNSRIAEVGESYQSFNVMTKELRATEVLQMDFVSDVSHEFKTPINAIEGYTMLLQGEELSPEQEEYVEKILFNTQRLSGLVGNILLLSKLENQNIPMKKTEYRLDEQIRQAVLSLETKWTEKEIGFQVELEEVKYTANEGLFMHIWINLLDNAIKFSPSKGTITMFLKQEQDSVKFILEDEGPGIEDDVKSRIFDKFYQVDGSHKAEGNGLGLALVKRIVDSAGGTIKAENREYGGCRFVIELPKQKDEIIMTFYQELQLNQAGSKNLLKKSETLKEKLYHMWVYLVKIAATMAFCFFFVSIFSILFGNENSIVGVVVLLCLMVFRNADLGIHTGQSTMLLALFFVIMTVCPHLANQFSPVLGMLLNIAALAVLILFGCHNPSMFNQSTLVLGYLLLYGYDVTGKSYQMRLVGMALGAALTCFVFYRNHKNRTYKRNLKDLIQEFDITSSRTKWQLCQILCVPIVLCIAELCNMPRAMWAGIAAMSVILPSMEDMHYRVRKRIAGNIAGVICFTVLYFLLPSSIYAYIGILGGIGVGFSAQYGWQAVFNTFGALAIAAETYGLQGAVSLRVSQNVFGVVFALAFCVIFYWFMPKKKESEVTVHAEMQSEVNQEENLNTTDFDEHFAKISSYIVDTLHGVPLEMTEDEKEQFRIQVISNQYAERLLTLNLRDSRVYDTIEEDGKEKRVLNQNETTLAQQKQQAIKDAFAGWVWKDPQRRTLLVKRYNELFNSTRPREYDGSHIHFVGMNPEINLREHQRNAVAHVLYGYNTLLAHEVGAGKSFEMAASAMELKRLGLCQKSLFVVPNHLTEQWASEFLRLYPNAKLLVTSKKDFEPSNRKKFCARIATGDYDAVIIGHSQFEKIPLSAERQERLIQEQMDEIEEAIEEAKAQVGEHFTVKQLEKLRKSLKQKLEKLQGTDRKDDVVTFEQLGVDRLFVDESQAFKNMENQNSSYSVQIGKTTFIVCGKQSETAKKPIEKMFKDMCRHEVTRDFLADNLMNLEKLPKTSWLWKPYLPFGKLSVLQGNPGEGKTYFAMHLAAACTSGKLLPNMERMEPFNVIYQTAEDGLGDTVKPRLIEAGADLDRVLVIDDSDVQLTLSDERIEKAIIENNARLVIIDPIQAYLGADVDMNRANEVRPIFMRLGQVAQRTGCAILLIGHLNKAAGMQSLQRGLGSIDIAAAVRSVMFIGKLKHDPTMRILTHEKSSLAPPGVSLAFSLGDEGGFRWVGEYDITADEMLSGIEPQRETKTQQAKDLICALLAGGKQGLSEDIDKAALERGIPGRTVRDAKRELGDALKSKIVEGRKKVFWMELLSFIELFPKNWQQHNYLSLGGVSGKALRQFLSERPDVERVFLCLDADKAGEDACKRLTALLPDTVSVTRIQPCMKDWNDVLVHRAEIPNRNYFKSIVLKEPSKPETVKIIRMSDVELTPVEWLWKPYLPFGKLSVLQGNPGEGKTYFMSIKNVKNWAKSQKNDFGVKIVKKCLLFEGCCAKIHYCQADVRQNEILQKRRQTERFDRIKNESQKSFKKVLDNLSRKMVTDKTRREAFITQNLGLVHACAGRFRGRGMEYDDLYSAGCVGLIKAYDNFDESRGVCFSTYAVPVILGEIKKLFRDGGTVKVSRSLKELGMRVQAAREHTMKLCGAEPTLQQLAEQLDEPIENVALAIQAAQPAMSLTPEGGEDGDRQLDIPVESPEEELADRISLAEVIEALPEQDKQLIRLRFYGNRTQSETAKALHTTQVQISRRERKILIRLRARLLEEMKAENSTRVQFDSLSSNEAYARGVTAAFLARYDPTVPQLADLKTAVSEAVTNCIVHAYPEHIGPVCMTIAVYPDREVHITITDKGIGIPNVEQAMQPLFTTGNPEERSGLGFAVMQSFMDRVKVTSKPGKGTRVLLVKRLSRREPTMATVTFSAAGETLYAYLAGEIDHDAAQSLRMQLDDALVSRSPRTLIIDLGGVGFMDSSGIGLILGRQRCARVLGTSLRLQHAPAQLQKVLRLAGIPCTENIEKENTQMTIQQANQYFAALPDGFADPAQLGALLPASVQQVQFVGVAGTAGKTAVARLLAAILHAQGIRAGVYHAGCEPLAARIRVDGKPVDEALLCRAADALAAHEELPLQAAELVAAAYCFGEAGCTLAVVELPDAGLAAVLPKMPVCAVTAVGPDGVSRSVERLAALAGGVMRKDSICVTAPEQPKAVLSELIVAAGKCGCELVVPDPEDITFLEAEQFASRVDYGGYTVPLAFLGRHAAGNAAMAVELALALCRKEVDISDEAILDGIAAVDNRCSIRVLSQRPLVILDACRTPQQAAALLRVLNMAKVRHMSAIIGLTEEEGAEAFFSALETGLSPEEQKKDKSTMPGMSESPFDKVYLVTPAGVEEQLTRRLTEKAKYHFDAQLCTSLDEAVQLAHANTRRGLLVCGSEAAALEAAELLAKAMERYNDTERTSLWVIAGRVVFTVALIACIWFIFSNSMAVATVSTDSSGRVLAWMRIILRRLGQPGLAEHLTMHIVRKLAHFCEYTLEGFLLMLCMRVYSRHPLRHITVPMLGGVLTALTDETIQLFSEGRSSQVTDVWLDSAGVLAGILVAIVLLLACEGLYYHIKRRYEMKELAKQYDPSQVEDRIYQFWLDGGYFHTKADPDKKPYTIVMPPPNVTGQLHMGHAVDNTMQDILIRTKRMQGYAALWVPGTDHASIATEAKVVEAMRAEGLTKEMVGRDGFLERAWAWKTKYGNRIVSQLKKLGSSCDWERERFTMDEGCSEAVKEVFVRLYDKGLIYRGNRMVNWCPHCNTSISDAEVEYEEKDGSFWHLLYPVKETGEMLELATTRPETMLGDTAVAINGEDPRYAHLHGCHVVLPLLNKEIPIVCDEHADMTKGTGVVKITPAHDPNDFEVGLRHDLPIVRVFTYDGHMTGAADKAAADALFAAGKNTVNEPEVLDCGKYAGMTTLEARKAILADLKEGGFLKEIEPLKHEVGTCYRCHSTIEPMVSKQWFVKMEPLAKPAIESVEKGEIKFVPERFTKNYMNWMKNTRDWCISRQLWWGHQIPAWYCDDCGETVVAKSAPCSCPKCGSAKLTRDPDTLDTWFSSALWPFSTLGWPNEDSADLKYFYPTNTLVTGYDIIGFWVSRMIFSGLAYTGKAPFDTVCIHGIVRDSQGRKMSKSLGNGIDPLEVIAQYGADALRFMLVDGSTPGNDMRYIEKKVEAARNFANKLWNATRFVLMNLPEDFEPGLPCEELLDMSDKWVLTKLNQVAGAMTDNLEHYEMGLAAAKINSFIWDVYCDWFIEIAKPRLNSGDAQQADTARRVLVYVLDKALKLLHPFMPFITEELYQALPGSAETIMTQAWPTFDAAHNWAAEEEAFEKVMDYIKAVRTMRTEMNVHPAKKTSMIIETADAAPFQNAQVYLAKFAFATDVTFTEKYEGSTDGMVQVSTHAARGFIPMMELIDREKELARLNKEKAKAEKEMAMFGNQLNNPKFVERAPAALVEEIRTKFAKSQDKLANIEQSIKALGMNTEKIPLISVIVPVYKVEKYLPACLDSLLAQTYQNFELLLVDDGSPDKCWEILQQYAAQDARVCIFRKENGGVSSARNFGLEQARGEYICFVDSDDLVLPQYLEWLYDALCSCGTRIAMCRYRSIRENETLWTVTECPAPQKITTENYSWMQEWSGGHCWRMLTHREVLQDVRFDPALFYGEDALFFVTEFLKAGSLAFLNCPLYAYLERPSSAVRQEPSLRFYTAALAWEQIWQLVKGQPDPFRSTTEQRCVMSCAEVYFRLVNQPERDSEKEKMVLKTAKLHRHAAWEIPPGNQSQKLQALMVSYCPHLGAKAWKLVRWVKGLKNMRTRYSIINMLFNIGGQFLTMLLSFINRMVFIRCLSAEYLGVNGLFTDVLSILNFAELGIGTAMVFSMYEPAARDDEQKLARLMNLYKWMYRAVAVSVLLFGLVLLPFLPYLIKGGEGIEHITLIYMIYVLGSASSYLLSYKNSIYQAYQKGYICAGWSMACECIKTVSQITVLLLTRNFILYLAVQQAIQFLPNIMVSRMVDKEFPYLKECHELPEREERNGILKNIGAMSMHKLSTIIVRNTDSLLMSSFIGLATVGLYSNYRLVINALNNLMGKFAVAFSGSIGNFAVMENSDRLYKIYKEMDFMFFVMSAYLTGGLMMLFNPFITLLFGGKYCFSMTTVMVIVAEFYITRMRQTNLLFREAMGLFWNDRYKAVAESIINLVASLVLVRQYGVTGIIWGTIISTLCTCAWVEPYIFLKYGVQDAWQKKLRDYFAEYLKRTLLTAAVSAAAVLWVQRFPVGNFGIFILDGLLYTAVFAGVIVLFYRRSVEYTELKRRGLEILKRRAGMPCEKPLLSIIVPVYKVENYLQKCIDSILAQTFTDFELILVEDGSPDGCPALCDAAAAKDARIRVLHQKNGGLSAARNAGLDVARGEWIGFVDSDDYIAPEMYETLYKAVQSTGADLALCDYAAVDEAGIPCLPPYTGLAQRIFTGRELLKRATNTMAQPAWNKLYRRAIFAQLRYPEGKLNEDIFVLPEICLNTKKAVVVPKELYYYVQRGSSIMNGSKTLRHFDAAEAAQRYWNCLVENEVYDALANAAKFTMGSVSRVYRQLPPALRKAPRSREMLRMQFDVVDRTRQYCTVPAGLWLQSLLLRLFPREYMWLRNIKGRGELKIAMLDVRKLLAQRPLLFDGGMGTYYKAKPGQECEQANLTDPEGILAVHRAYLAAGADAIKTNTFSLPRLAAAQQLGWEQLADAGWQLAVKAAGETGAAVFADLGPAPDTENLPAEQVYLAVAKRFALLGARNFLFETLSAEDGVLEAIRALKQTVPEAFVLVSFAVLPDGYTREGRYCAELVRRMAQSGVVDAVGLNCVSAPGAMRALVQQLGDAGLPLSVMPNAGYPVVARAQVRYQGKPEYFARELSRLAAEGVRILGGCCGTTPQHIAALRTALDALPEALPAAPAAKPAAAAKPAGKTDDAFLRKLRTGQRVIAVELDSPKDADLTAYLEGARRLQAAGADLLTIADCPIARARMDSSLVACRVHRELGMNVLPHMTCRDRNLNATKALLLGLYAEGVREVLAITGDPIPTAERDEVKNVYQFNSRKLAQYIVSLAGEGREMPAPITVFGALNLNARNFEVELRRAAEKLENGMSGFLTQPVLSAQAVENLKKARETLGERAKILAGILPVVSQRNAIFMENEVNGIHVDDAIIQKFEGLDRAAGEELGLEVSVQAAKAAAPYADGFYLMTPFNRVALMERLIARLRTEVTDMRHTGTPELETDRLLLRRLLPQDAPQMYENWANDPAVTRFLRWEPHKSPAETRELLSAWAELYPNPDYYQWAMVEKATGQVFGSISVYNALLGEPQQKAKWPGLELSGGIWEPGYCIGQKWWGKGLTTEALQAVVDFWFNQVGGAFLTCCHAVQNPASGRVMEKAGFVYHHNDVYHKFDGTPVECRCYLLTKERYDNRKDLLMSELYDILTETPPTKVVLLALDQGLWDCERSLAELSALCEANHMEAVAQITQKRQTPETGIVLGSGKLEEASLAAQTLGAECAVFDGELTGSQIRNISNALGGLEVIDRTMLILEIFRSRAVTNEGKLQTELALLRYRLPRLQGMGEALSRQGGGGGGGGGARRGAGETKLELDRRHVHARIDALAEKLAEMEKRRGESRKARAKTGMPVVSLVGYTNVGKSSLMNALCGPSVAEADMLFATLGSTSRKLVLPSGMAVLLVDTVGFVSRLPHNLVEAFKSTLEEAAWSDVIVRVADAGDEQREEQLAVTDEVLDGLDCADIPRLTVYNKCDKPNTLSFDPDILLTSAKTGYGLDKLLQKLDEVLSDRVHTIRVLLPYDKLGLAAPMRERGSVQVEEYREDGLYLEGIVKTEDLHCFEGYLVMDDLDRKILTLLAKNARMPVKEIAEQVSLTSPAVSSRIHKLETDGIISGYTVTLNRPADRMYVDALISLSVAPSKQDAFLELLQNSREVLQCYHVTGAYTFLVKVSCGSMAQLEHLILQFQKLGTTSTQIILSTPVNHGDLDALMLMKKFIAALLAGLTLFTLVGCSGGSKADSSTPKDYSQIIHDARSDEDNEYDMIFTKGEDGKFTAIDGYSAEYKADQLNEEIRDILMPPLNLEDDQYTAFAASISSMMVRSYAVAIVKPAEGKTNEVKAALEAYVASEQQSMEHYLEDQYLVAKAATVTVAPTGEVVLVCAEDHDTILANIEKALAAMSKATIVIPNINGKGWLKDSIESIYAQTEQDFDLIVVDNGSTDESLEQARSYCTRPNFTLIENGRNTGFSYAVNQGIARAQSKYVVLFNNDAFAEPQWLAELLRTADADPKIFAVQSLMIRHFERELADDAGDYVTWMGFACKTGDGRRVSRYTKQKRIFSACGGAALYRKSILDEIGGFDEHFFAYFEDVDLSWRANNAGYKNVLCPAAKCYHICGASTGAVRYNAFKSQQSGRNSILLPLKNEPLLMLVLNFIPLALGYLLKCYKFHKQGFGEAWDKGMHEAFALLKAGKLDKRPFRWRDLPNYILMELWMIWNMVPYLWYRLVVVRFDLKMKNTITPEEHARIKRRRWRQTLGLLITVLVLIGFITVLRAGVGLVANLFDDTAQKQEYEDKLEGLVLFDPMPFDGIENIDDLTLREAAVWGCVYSIQETQGGFENYNTDPETEQLLLPSVEVDAYLAKLLGPGFKLTHRSFDMEDMTVEFDETTQCYKIPITGTVGYYRATVVKLFKRSGKLHVTVGYIPTASADDSIINPSSDTPTKYMDYLFERQSGSWYLTGLTESETKPESAASSAAAQPEPMAESDVQDAILATAGDSAAADSAAASAVQPEAQAETGADSAVAEAPAAEDAASTAAMNIQIFGTSKCFDTKKAQRYFKERGIKFQMIDLKEKGMSRGEFDNVARALGGWEALVNPAAKDKQTLALLDALVDWQKEDKLFENQQLFKTPIVRNGRKATVGYQPEIWKDWEMNAFVDPELCIGCTQCAGLCPAVFRMEGVLAVAEPGPIPPEEVPQAVTAAQSCPVSAIRIEEMRLLVIDGNSIANRAFYGIKLLTTKDGRYTNAIYGFLNILLSLLKECQPDEVAVAFDLKAPTFRHKMYDGYKATRHAMPEELAQQMPVLKQLLADLGYRTVTAEGWEADDILGTLAAACAARKDDCFLATGDRDSLQLVSESTTVLLAATVMGRSKTVVMDEDAIQEKYGLAPKQLIEVKSLMGDTSDNIPGVKGIGEKTALSLVQAFGSLEGVYQNIDDKRIKPKQREHLLEDKPMAELSHTLGTIRTDAPIDTAEGSYTVGEGNKPAAVRLLQELEIHSLIPRFGLDGVAPEAAAEEEAVELPEAELTPLPLTPAGHYLVAARPAVTGKQGTRNVVLQLESWYAVQDTTVYPLEDADLVRLLDNADVTLDVFNSAPLYAKAMAAGGWGSSIVWDGKLAAYLLDASASKYQISELIPAYKAAAAFTCTDYPDAGRLADLFARMKAEITACGEDALYNEIEFPLAQVLADMTRTGVLVDKDGIEQFGVKLREELEQVLTRIHMETGSATFNPNSPKQLGEMLFDTMGLPHGKKTQRGWSTDAETLESLREYPLVEDVLQYRAYQKLNSTYVEGLLKVIGEDGRIHSTFNQTEARTGRLSSDNPNLQNIPIRTELGSQLRAYFVAKPGCVLVDADYSQIELRILAHITGDEHMQQAFLNGEDIHRSTAAKIYGIPQSEVTPRLRSSAKAINFGIMYGKGAYSLSKDIGVTVKEADAFLKNYLAAFPSVSGYMDKTIADAKANGYVSTLFGRRRTLPELASTNFNVRASGERMARNTPIQGTAADVIKLAMVRVWKRLRDEKMASRLILTVHDELIVEAPEAEAEQAARILREEMEGCVQYAVPLSTDVHAGKNWLEAHMIILGIESTCDETAAALVEDGRHLLSNVISTSVKEQALYGGVVPEIASRRHCEFISATVKKALLDAGKTIDAVDAVAVTFAPGLIGAVLVGVNFAKGLAYSAGKPLVPVHHLRGHIAALYLTHPELKPPFLCLVASGGHSHIVEVQDYTHYHILGHTVDDAAGEAFDKVARTLGLPYPGGPSVAAAAKTGDPKAYRLPVPHVEGKYNVSFSGLKTAVLNEVNKAQMKGEEVNVPDLAASFQERIAGILAEKLLLAAADTGAKQVCLAGGVAANGRLRQLVNDGAQKLGAKVYLPELKFCGDNGAMIAAQGYYQYIAGHTAGLELNGLPTLPIDYEMTERNPILQSLFDRKSVRVYEEKPIPAEMKQAILEAAAQAPSAGCQQLYTILDITDPALKEALAESCDHQPFIAKAPLVLVFCADCKKWYDAYLEVGCTPRTPGVGDLMLAVTDTAIAAQNAVVAAESFGIGSCYIGDIMENCDTQRSLLHLPDYVFPAVMLVFGWPTQQQKDRVKPQRCAMEHIVHENGYRTMDGAELRDTFGYKAGNTPFDQWCTAFCNRKYNSDFSKEMTRSAEEYLNQFRMAVEITEEFVWQSIPRRARDSHKGTFGSVLAVAGSAFYRGAALLAAEGALRTGAGIVTLASVEPVVGAAVTRLPECCLCPCKEGAQGGIAPENVPLLRRQKATVLLLGPGLGGTAQSAARATETRTLVQQLLPGFAGAAVLDADGLNAAAQLLAEGKPFPHPAGELVVTPHPGEMARLTGLSAAALANDRAGIALRYAKAWNAVVVLKGARTVVASPDGRVCVNPTGNPGLARGGSGDVLAGMLAALLACGLPAYQAAACAVYLHGAAADRAAAKRGEYGMLPHDILPELGALFAENQRMETTQKQIVLGILAHVDSGKTTLSEAMLYRAGAIRKLGRVDHGDAFLDTDSLEKARGITIFSKQALLTAGNTAITLLDTPGHVDFSTETERTLQVLDYAVLVVSGTDGVQSHTETLWRLLRRYHVPTFVFVNKMDLPGMTREQLLSQLNHRLGEGFVDFGAEPAARNEALALCDEQLMEKMLDAGTLTDADIIPAVARRHVFPCWFGAALRLDGVDALLEGLDRYTRPAPALHAFGARVFKVSQDEQGTRLTWLRVTGGELKVKALLTGEADGEPWAEKANQLRLYSGAKYTLTEAIGPGQVCAVTGLTHAKPGAGLGAERDSDVPVLEPVLSYQVLLPEGADVHAALGKLHRLEEEEPQLHVVWNESLGEIHVQLMGEVQLEVLRSLLAERFGLEVSFGPGGILYKETITEPMEGVGHYEPLRHYAEVHLLLEPLPRGSGMQFAADCREEVLDKNWQRLVLTHLEEKQHLGVLTGAPLTDVKITLLAGKAHLKHTEGGDFRQATYRAVRQGLMLAKSQLLEPWYAFRLEVPVENIGRAMSDIQRMEGSFDPPESGAETATLTGFAPVSTMRSYPMEVVSYTRGRGHLSLTLDGYRPCHNAQEVIAETGYQPEHDLDNPADSVFCAHGAGFVVPWSEVRSHMHVESGWGKAKPARPEVQAAPQRRAMAYRATLEEDAELLKIFERTYGPIKRDPLAAFRPVQKTERPDFAAEQWEIAPEYLLVDGYNIIFAWDELNALAKESLDAARRKLMDILCNYQGYQKCVLILVFDAYRVPGSPGAIEQYHNIHVVYTKEAETADMFIERVTHEIGKSRRVRVATSDGMEQVIILGHGALRVSARMFHEEVQNVEKQIRALVQGQAMEKPAAACYHLPGLFEFYELYRRFLPLYREHREYFYEWCTIGSIYGAPAGCIWGGGRISCGGAAAHEVLALLREYGISGRLTFSNSLLRAEHLADPQCNALCDQFAKSGSVPNGVIVHSDLLADYLQQRWPELYLVSSTTKVLTEFAELRQELAKPQFRYVVPDFRLNPALEQLRTLPPEQKAKVEFLCNECCWFGCTERKRCYETVSRQNLGEDCPDHRCAAPDAAGGYRFSKAMRSPGFIGVEDIRQRYLPAGFSQFKIEGRGLGSALVLEFLLYYMTKPEYQLQVREAIYLDNMLDLFMEYHYPKFTPEMKKTHTILIPNMAVTQFRLMEYALRCEGYKCELLGNCGSAVAQLGLKYVHNDTCYPALLVIGQFLDALNSGKYDLEHTALLITQTGGGCRASNYIHLLRKALVKAGYPQIPVASLNFSGLEKDSGFQMTLPLARKCIACIFYGDMLCALRNQVAPYENEKGAADRMVDRWIARLGRALLAGKGFTSREMKHTFPLIAKEFATIPVTRVPKVKVGVVGEIYVKYSPLGNNDLQKFLESQDCEVNFPGLMGFVQYCAFNMGEDHVLYGGKLAVKVGTDQFLNWLDSVERVMLKAETDAGFYAPGPFKELVEKPKGVISLGAKMGEGWLLTAEMIELVQGGYGNIVCAQPFGCLPNHIVGKGMVNKIRALYPSANITPIDYDPSATRVNQENRIKLMLAVAKERLNAPAEAQPLTAEQLAGGAPQVGATVMRVGLDIGSTTIKCVVLGEHDELLYSTYERHYSHILEKAQELLRRIDAEHLHGRKALLSISGSAGMGLADSCGVPFVQEVFSTRVAVKRFMPKTDCVIELGGEDAKILFLTNGTEVRMNGSCAGGTGAFIDQMATLLKMSAEEMNKAAEQAQRTYTIASRCGVFAKSDVQPLINQGARTEDIAASIYKAVVNQTIAGLAQGRPIKGNILYLGGPLTFSTVLRKSFDEALNVTGICPENSLLYVALGAALYADKEFVLTEVAAALDKYAATATYASEPPLFASKEEYEAFHARHMSHSVPRVAFSAHCGPVHIGIDSGSTTVKLVVVDEKSQILYTNYQPNLGNPLPLIREQLLKIYKEHPGLQVASVTTTGYGEELVKNAFRCDYGLVETVAHFTAAKYFMPDVDFIIDIGGQDMKCFKIEDGAISNIFLNEACSSGCGSFLQTFAQALGYDVKKFAALGLFADRPVDLGSRCTVFMNSSVKQAQKDGASIENISAGLSISVVKNALYKVIRASSPEELGRKIVVQGGTFYNEAVLRAFEKEMGVEVIRPDIAGLMGAYGAALYGLRQSHKNNQTTSAMMDEQELEKFAQQVVSVKCGGCGNHCQLTVNTFADGRKFISGNRCDKPVTGKSEDNSLNLYAYKQQLLASYKPVPGKRGSIGIPLCLGFYELLPFWYAFWTSLGFAVHTSPVSTRGLYLAGQATIPSDTACFPAKLSHGHIKALSQMQLDAIFYPCLTYNVDEGLGDNHYNCPVVAYYPEVLAGNCPELEGKKFIYDYVGIHRPKDFVHKMAKEVLPKYFGGISEREVQAAADAAYAEYEAHMAKIRVKGSEIIDEARRQGKRIIVLAGRPYHVDPEVNHGIDHLITRHGAAVVTEDSISNRVQKFPTSVLNQWTYHSRLYAAAKYCTTQKDMDLVQLVSFGCGVDAITTDETREILQRGNKLYTQLKIDEITNLGAVNIRLRSLFAALDERDEAAAEKSEMRSHSKSFRRYKAAAQSAVRRLFLRENRHMFTKSSAFMSTKPIDSTAATRFDLSAAALHILAMALMLMDHLWATLLPAQEWLTCAGRVAFPIFAFMAVEGYFHTHDLKKYTLRLLLFALLSEIPFDLMYGGTWFYPVHQNVIWTLLLGILGIHLMETVRKKQKTWLYLLVAALVVAAGAVLGTLGMVDYYGAGVLTVFIFYFFHGRRWWCLLGQLAALYWVNVELLGGLMYPIQLFGMDFELCQQGLALLALVPIWLYRGRQGYHSKPFQYACYAFYPVHMLLLVLVLNFVNRMHFFIEHSSGFGFFTGYFGYGKRRGGCHFTPRAKGRRAPTRHAESVCPQQSAGQIHEGWLACLPMETMNLKEAFRYQNKLQSLLDEAQGILDCDANVTKVANTYLRHKVMPEAEDETVMDVAQTEYAEQITDVARFMLYLLEEKSRLFAAIRKAKDSLDMDMDSEVSLNAARQSIARTFKRMNDLRSSEQLLSGGGTGYRFNAEGNQISYCCDVKRVTTINYDRKVIHAALSKLNRQADETSNRLDLCLVTSKVDYTVPFDVNASFAEAFEIYLENVQNMLRIEYFDKERFMRQLSASHGSVLLHLDNGKTCDLKKDTTARSMLQMMDTAPKKGFDLTVTDPADVTGFLRYMLEAGRTERVAGMAYQTSCASYTSGRVGLSSATAVVADAAGREQTQHGSPLFPIACYAEDLSCFSVAWHWHEEFEFILAALGPIHVDVNKTRLTLQTGQGVFINSGALHAVEPAEGRALLHSGVFQPRLVGGMDTVFWQKLIRPLLQPGTPPFFLLDEAVPWQRQVLLCLREAWKGVADEPFDYENRVRYHLTAALRLLITQCVSGKVKVSEQEQIASERMKQMLRYVEEHYAEELTVEKLADCVALSESACLRSFRQFLGITPIQYVKQFRVEKAAELLRSTRLKTGEVGLECGFSDASYFIKTFREIKHCTPREYRIRFCMAYTKADLKHDLAAMGLTGNETILIHSSMKSIGPVEGGADTVLDAWMEFFAEGLLLLPTHTWRFINEENRVFDVRHSPCCVGILPELFRQRPGVVRSLHPTHSMAAYGKGAAAYLEGELDANTPCTPGGCYDRLRAAHGKVLLLGVTHARNTFIHSVEEVLNVPNRLTDKPMQMTVVDEAGAQHTVYMRRHYNAQQPHISEDFVKLEQAYLDCGAARNTKFGDASCILCDAGGLFRVTRHVLAPNPEAFVTEPVIPPERWQGGILMTLKEKMKKGPVFGMACFTGTTCVIENIAMSGLDFIYLDLEHTNYMLDEAFEKQIMAAKLHDISVLVRMADDNEVAIRKVLEWGADGVVIPHCKTAEMARRSVEGAKFAPLGRRGGETNVRAAGFGYHNFDWNAYIEQQNRDTLVIPMDEDFEFTDNIDEILDVPGIDAVNFGPIDYAVSKQLKIGYSMGEEVHEAYKTLVAKCRAKGLGVLGPVVPPTQENLKQAIADGYNMIILGNDMWHFQKALKELVNDQVAPVRKELLGEMAMLILLVLLIFFAALGVPLAFAIGASCVSYILIYAPNFIAMLPQRVWNGAYSELMIAMPLFMLAGELMNTGGITQRIINFCMELLRPVRGGLGEVNIVASMIFGGISGSSVADTSALGSILIPAMEKEGYPPEASAGITVASSTMGMIIPPSTPMIVYSMISGASVGALFMAGAVPGILIGLTQLVLVYIISAKKGWHPAKAKFDAKRAAKSLLSGIPALIMPVFIIICVSFGVCTASESAGVAVLYSILVGFFVYKELTWKGVWEALKKTLISSSSIMLIIGFTTIFTWVLTMQKVPQTVGAFFMSLNLPAWAIALIFDVLILLIGTFIDVSPAILLLTPILLPVMQQYGFSPLQFGAMMITGLAIGLVTPPVGMCLNACNKINRMPIIEIFKGAAPYVICNVIVLISISLWGPLTTALPQLLGYSIFMALLAALVIFTVIARYCFSLSWKQLAEFNTTLFAFTTFWGMGINVIKDEHVMIDIIYDGVKPARKRWLAIVNYLIVLAVDLVFTYQGFKYVGVAGKQISQGMEIPMMYMYGIMPVCGIICAICVVIKIITLYKADISFFAPKNKALTKEDAMKKISRRNFLKVSGAVAAAGAMAACGGSASSTTTAAPAASSAAGGDDKFASLGSFTMTVGHAQPEGNPRFVSMEKFAEDVAAATNGHVKIEVYGNGQLGTEKEMLEQVVAGTIQGMRGGQFDFSPRLLMFTLPFLTNTRAQVTALLQSELAQKVCAEAEGETGTVIINLCDAGGYRQFSNSKHPIKAPADLKGLKMRTNGMKTIDMTFQAMGATTTTIPYSDLYMGLKTSVADGQENPWVNVEGMKFYEVQKYFTEVNYQFHPDPFYVNAAWWNALPEEFRDAITECATAMGEYNDQLIDQNSSAAKQTIVDYGCEVYEPSADELKAFQQAVQSVYDKCISEGICSADELKEMQDIVAKAMSGRRETASCLSLCRSTCIQHLLRAAIVTKNTYFHKSNIHMATLQHTDELYHILEDEICALKILPGEALSENQLCKRFGVSRTPIRSVLQRLEQNRFVQIIPCKGTIVTAIDTGVVDQLIFQRVAVEGMVFRDFVQSCSPMEILAVEHLYNMLLEAAAGRSDPENFDFNHFLSCDLAMHEYWFHKTSKEYLWEQMTRPQADYSRFIRLDIVGARNVSSVVSEHAEMLRILREKDLDAIEPLMRTHLYGGVSRMGSKIYSDEYRGYFKLPENKKMENAGSRPQSPKTDPNRRKCGRQRTEKAAKMRRTSCGTAENMLYCFAMRDAFFKKHSPQGAQDSYCKGEIYFFLIFLIIFSKDCIFCCGSGTLDVIKISMKKFLKTLVVGLCLFTLLCCALPAAFAADKTSGSKKEENVYAIGMDAQGGICSTVVTYTNLSGKLESTPEQPTMTGYTFDGWYTEPVGGSKVTTSTVFTSDATIYAHWTAKVGTSTVPQPTTQPAATQWQKYVGPALVAGALLTTLLVATMFMTTSTMKMPASYSAIEAEEMTYLDGGASNAYQSFLDVGKVFNYIARIFSGASSIINNVNVIYQSFVSLNSLLGSFGKMAVFWTFLIYKAKKCDIFSALSLDFVSDLLYYCYSGCARIRLFIKCPSDRVKNRGGKRFFRYFCMADRELRRMHRAELIEIIYALKQSEDQLKAQNAALTAQLQDRQLRLESAGSIAQAALELNNVFAAAQAAADDYLHSVQASLADTNATAANTLSQARSEAKRILEQAQADADSLKAQAQQECDAMTAAAAQKRTQTEADCKAMVERAEQEVQQRWQAFDHKANELLDQYRSTDGLPSEETMKKRDIRFASIPSTEEVAAERERLAYQSRYQRVLRSTIYILVVVAAAAVLLATLFLPVLQVSGDSMYPTLNDKDIILLVKSNHIENGELCGFYWQNKLLLKRIIGQPGDVIDMDVNGVVSVNGVALDEPYVDALTVGECDIRFPYQVPENRYFVLGDHRATSIDSRSSVIGCVEKSQIVGRVFLRIWPLSSFSLIHMNDILKTYMERFRENRHTLRRYTAFVLALAMITTLFVNWQLHGVGISMTAQYQCGEEEHTHTADCYTKVLTCGYEEGELENADEVAAAAATSQPTVEAEPAPLALEPQIEFVPHEHTEDCYTEVQTLTCMEEEHVHGDDCFDPEDGTLICEKFEHTHDENCYTTEYELTCGLEEGELVEQVVEPTQSAELAAMAVAEPVALEPTVDTVEPIYHHHTDACYEEVLTCPLPEHHHTVACLSDTSADVETPEEWQAANAEAVMTGNWDEDLLSVAKTQLGYEQSEKNFEIDPADGVTLHYYSRYGQSYGNPYGEWDVMFLSYCLKYAGIPQSAIPQEASVLALRSSMSDMDWLLDGEDGSAANVGDIVIYNKYVTRTVAVDSSADGAADDLDDLFSMDAEGENGAELETSGASALDTAPAAEDAPAADSVITPDLPDTANPEQPAAKPVDSTGTSASGADTLIPSVASPAAEPQTTTVTDAQPVETVGIVSEADENTLTVISGDVDGKVAEVTLSNAEVLAVVDVAAAQYADEMLSSAVDGALKAPDMLTLAGEPMTASTTATLNDNWITGTTITLNGNTYTVKGTPTTDAPTLPEGVSVTVNDNVSLHYGFDIPDGSAKGVSTLTYKLPSHLIPLKNTASGFLTNGQNETIGTITVDTNGLATLNFNKPLSGQTSGTFYVDCRVSETSTPTENQIRFPGTSHTVEIKKQTDVKVKKEIVKNASGSEYTLQADGTYKVHYKVTVSTKNGSGETIDLVDKITEINNISDVKYQDVKLYKNGSTDPYNDCKVTPFEEYGRPAIKITTKNDGELPALNAGQYYTLEYDLVFKKTKQDWGNIKNTAFANGESNGKEISFQNELQKYGSYDPKTKEITWTIEIYPNGNTLAGLELNDTLQNGMKMTGKFIIKDKDGKKLVNEPNFEAGKDNFTYTFPTDSPFNDPNANSKYTVTYTTTAPADFATNPTVSNTATIKLNGGKKWEGTGSAGYNKGSEVVSKTTKSGNNESTLTTSDLDTTTGLFTLPWKLEVQLPDNESSPTVEINDTIIQPKKGDHYAVKSELETAIQKNLLVFVGENSYGYNDLSKAGLNLTIHYYAEEDCKDKDEYTFPNDNDTVRSFKLTFEKTDTFDLDKVVISEYSTKASYDKTALKPGDKIKFQNKCEGKTTATYYFTVPADNSMGLVKTSSNTAGGTNSEGSYSANDVTVEKGNGYTDFNGVKHEGTYIYYQLELTPGDLTKWTATTVTDTLQDGLTYVKDSAYVVVRSGAEDMYTTGNTWRQYMSDAQWYKNGDEQSQIQGNLSTADFFSVQQNGQKLTFGLTGNFKYLKYPDPQLVDRILIRFAAKVDDSIWDPTQQVQTVYFSNSAKWGEYSSTTKTEVKHESQIISKKGQYDDSTGYVRYSVVINPDKLKLGTDKMIELVDDMHPDGNESNTAALVRSTVKLYSYDPTAPDKKGAEIADGVYTVDYKETQKNQRNHYILTVSVPNGYAYVLEYAYRNTSNTSYQMKNTAELCGKTFEATPTKTYATGAGGTADSAGLHLYKVDSRDARKLLPGATFKLEWFDIDSGTYKDVQTVTTDANGEIDLTFSAATSSKPGEDTTGAVYRPHNYLYKLTEKQAPDGYRTDTDWAHYFIWTSDSTSDDVAYKTAVGTYNATNTEVTKDKVNIYHGSASIDLEVTNESNRLTFVKQWIDKDGKAIPKDASSLPDNIQLELWCTPTKGDTPNAKMVDTITLSKTDSWTYNYAIPEAYKDRYFYVKEVATNKNYTVSYIGNDGVQHGTITIINTETDSSGYELPSTGGTGTLPYTAVGGTMMLTALAYSFIHRKRRHEGRADDMKKAMKKLMAALLAVAMVCAMAIPAFAAGEDATAGATTGEGKITIDNVITGQTYTIYRILDLEYHAATNAYRYTANEAWKDFIRNQTGDLKLDENTGVVTWINDNNNNNGTAIQKFANDAGTYAKDHDVQAVKSIKAEGKMGEHSTADNSTSITFENLPLGWYLVVSNLNKGALCSIDTTDPNVVIKEKNSDSTFDKHILEGTEFKTANNAGIGDVVNFQIDIVVNDGQPKGYVVHDKMSEGLNFNSSTVKVFLLRHSSPDDSGLLTTGYTLVTNPDDSCTFEVKFDDGTLKPNDAVTISYTATVNNKAVIAGSGNTNEAHLQYNDKTTVTHTTTTYVWGMGVRKFANLGTGKEDTPLAEAEFQLYKKDGETQKYAMFIETGVNTSIYKLTGWTTNKADAIKVKTPANGNIKFEGLDAGTYYLEETTAPTGYNKLTAPITVVIESTLPTKGGAASYTVKANNVEAPEYIVRVENKAGTELPSTGGIGTTIFYVVGGGLMVAAAILLITKKRMENHMKKNKSTIILILVFFVGLSVMLYPTISDYVNQRNQSRAVASYAQDVDKMTDADYSAYFDAADAFNAQVAANENALYRPDQLTGYNDTLDITGTGIMGYITISKIGVELPIYHGTSDGVLQIAAGHLEGTSLPVGGASTHAVISAHRGLPSAKLFTNLDQLEVGDTFTITVLDRVLTYEVDKISIVLPTETDELKIAEGKDYVTLMTCTPYGINTHRLLVRGRRVETPDQYKHLRVTAEALKIEPIIVAPIMALPMLLILLIGMLISTRKPKKTRGEEHEKHMKSIDLRHRLAAVLLAMCLVVCCALPAFATSANIVLGRLGSLHVRLYDTHNDVPLRGGELTLYQVASVKRTNGNLYFDYTDDFTGCGVVLGDLSDSTLADQLVKYLPAVPAIAAQQDVNEEGYANITKLPQGLYLVVQTEASHGYEAIKPFLVSIPLPDGDNWIYDVDATPKVGATIPETPDTPDTPDVPDTPDTPDTPDLPEQPDNPDTPVSPGTPDNPVSPGTPDNPVSPENPDNPVSPSNPDKPVLPQTGQLNWPVPVLACSGVLLFAAGWVLNRQGKKENMAIEFGSRKETFDNFKVYETMLAGRPFKVEMGKMCGLSNASALIRYGETCVMCNVVMSPKPREGVDFFPLNVEYEEKLYAAGRIPGSFMRREGRPGERAILTSRVVDRPMRPLFPKEMRNDVCITMTVMSLDPDCSPEIAGMIGASLVTAVSDIPWNGPIGGVQVGLVDGEIVLNPTQEQRKVSDLALTVAATMDKIVMIEAGANEVDEDTMLTAIKTAHVEIKKIIEFINKIVAERGKPKIDFQVVGLDMDVFHAIQNKYLDDFKAAMDTDDKNVRDAALLPIMDKIAEEYPDLSAADLDLVSYKMQKFVVRRWLLDEGKRVDGRGINEIRPLAAEVGILPRVHGSGMFTRGQTQVLTTCTLGGTKDNQLMDDLTDEQTKRYIHHYNFPPYSVGEARAPRSPGRREIGHGALAERALVPVLPSLEEFPYTIRCVSEVLSSNGSTSQASICGSTLALMDAGVPIKAPVAGISCGLITEGERWMTMLDIQGVEDFHGDMDFKVGGTRKGITAIQMDIKIDGLTYDIIAEAFEKCRKGRLYILDEIIKPVIAEPRQELSRWAPKMFSMMIPTDKIKDVIGKGGKVIQDICATCNCKIDVQEDGHVFVSAVNQEDAKRAIFTIKTIVEDPEIGAIYKGKVTRLMNFGAFVEIAPGKEGLVHISKLDTKRVERVEDVVAVGDAIVVKVTDIDQQGRINLSRRDAILALEAKKAAQQQMNKQEVMAKVALTEKDTGSPEVQVALLTAHINELNEHLKKNPNDHHSRRGLLKMVGRRRNLLAYLQKKDIERYRALIATLGLRKMLKRLRTAHPILYCILSEVLFLGSMVLFSLLATIGLAAAGADFDTMDGYLLGSVQEAVGLAVALLLLARTGRLDLLHRRGCGFLNGMLVGMYPLFFIGYTTVGTLAFDRPDTPLLPLPRILTFMLNMILVGVAEELVFRGIIAQTLLERYGTARAGVWKACLVSGVLFGAAHLSNLLGSEAFGVLMQCVFAASLGVMLAAIYFRTGNLWVTVFLHSAMDIAAMLIGGLYGTTSVAESVSGYDASRLLSVAVYLIPTVFLLRKKKLPEVQLYWGGIVKNMSLVEKLFGSFSDRELKKVNPITKQVLALEPKYQAMSDADLQAQTAAFKQQLTEGKTLDDILPDAFAVCREAAWRVLGMKHFPVQVTGGIALHRGDIAEMQTGEGKTLVATLPAYLNALTGEGVHIVTVNDYLAKRDSEWMGKLYRWLGLTVGLIVQGMDGDARRAAYNADITYGTNNEFGFDYLRDNMVTYKANMVQRGHAYAIVDEVDSILIDEARTPLIISGRGEDSSSLYTQVDRFVRTLRKSVVVELEDKVSTDEQADGDYVVDEKHKTCTLTAAGIKKAEAYFKVENLAAAENMTLAHHIDQAIKAYGVMQRDIDYVVKDGQVIIVDEFTGRLMIGRRYNEGLHQAIEAKEGVKIAAESKTLATITFQNYFRMYKKLSGMTGTARTEATEFTEIYGLNIVSVPTNRPVQRKDYPDAIYKTVEGKYRAVIEQVMECHKNGQPVLVGTVSVEKSEILAKMLQRHTRDFNVLNAKNHEREAEIVAQAGKKGAITIATNMAGRGTDIMLGGNAEFMAKAQMRKEHFCENLLNPDTPQDADPAAVELLLTEANGHGETTDANILAARQRFDQLYAQYKPAIDAEADEVRAAGGLFIIGTERHESRRIDNQLRGRAGRQGDPGASRFYLSLEDDLMRLFGGDRVSSLMNTLKIDEDTPIENRMITNTLESAQKKLEGRNFEIRKNVLKYDDVMNQQREIIYGQRRKVLDGEDISTEMHKMLRENIDSSCAQFLSGDVKDEWDFGALRRHYQGWLTTDADFHYTVADFDNLSQQGIADMLYDRGMQILQAKEVRYGAPVMRELERICLLKCVDRQWMDHIDNMDQLRQGIALRGYGQKDPVVEYRIEGFDMFDQMVDSIRESSVKMLLTIELRAAGSAPKREQVAKPTGEGFVPGNGAPGVKGSPKGQPVRVVKIGRNDPCPCGSGLKFKKCTCAQYHPTGNNGGEEMIAPEKLLEAAKALEPQLQEWRRTLHRHPEVGFDLPQTKALVKKALTEMGYTPQDCGKCGVVALAGGKRPGKVILLRGDMDALPLQEESGEEFSSELPGKMHGCGHDMHTAMVLGAAKLLKEHEDEIEGTVKLEFQPAEEIFQGSLDMINSGLLENPKVDAAVMFHVLAGMPLPAGMVLVPGGGITMASCEQYHIVVHGKGGHGSMPNACIDPITAAAHIHIALQEINSRELDPAGFGVFTTGRFEAGKASNVIPDTADMWGTIRTVDPEQKVSALIHQRMTEIAQGVATAYRCTAEVEFSDYCPCMVVDTPLAGNALTYMTELLGKGAMDMTPLTGGKPGGGSEDFAFVSHEVPTVSMFLAAGNAKEGYTYGQHHPKVRFDDSILYRGTAAYTYMALRWLAEHQMKQELMDAIQETPVIAAVKDDAGLCNALTNENIRVVFVLYGDICNIASIVRRIHEAGRFAAVHVDLIAGLAGKEVAVDFIRSTTEADGIISTRQSFIRRAKELGLAAILRVFLLDSIALESLDKIPPNLPDCLDLLPGTMPKILRRVCATAKVPVLAGGLIADKEDVMAALEAGITAISTTNQAVWDMMYDVAIIGCGVIGAAAAYALSRYDNKVVILEAENDVADCTTKANSAILHAGYDPAPGTRMARLNVRGVALAKEICAKLDVSYKQCGSLVLALDEKELPHLQHLFENGTANGVPDMKILSREETLAMEPNLSEKVCGALWAPSAAIVNPWEYALAMTEVAVRNGVELRRSCKVTNAEAIEGGYRLTVPGGTVETRCVINAAGIWADKVHSMVEPANFHIIPTRGEYYLLDKSEGTRVSHVIFQCPNELGKGVLVAPTVHGNLLVGPNAEPVKGNDTSCTSSGLEFVKATAQRSVPSINFGESIRSFAGVRANLDVDDFIIGEEPEAPGWIDLAGMKSPGLSAAPAVAEEAVAILQQRGVLGAEKADYKDGRRHIRFKELSAEEKAALVKEQPAYGRVICRCETITEGEILAALHSEVPANTIDGVKRRAGAGMGRCQGGFCGPRVLELISRELGIDPLDILQDKNGSNVLLSETKVGGKNNGMVDLVIIGGGPAGLAAACKAWESGLRDILILERDKELGGILNQCIHNGFGLHRFGFGEQLTGPEYAGRFIEMLKGTGVKVQLDTMVLEVTPDKKVHCVSKEYGYQIIEAKSIILGMGCRERTRGAIGTPGTRPAGVYTAGAAQRYVNMEGYLVGKRVLILGSGDIGLIMARRMTLEGAKVLACVEVMPYSGGLTRNIVQCLNDFDIPLYLSHTIVDIQGKDRVEKAIVAEIGPDRKPIPGTEMEFDVDTILLSVGLIPENELTKQAGIEMDPRTKGAIVYENMETSIPGVFACGNVVQVHDLVDFVSGESELAGAAAANYIQNGPVAEGRVLTVKPGADLGYTLPQRIRLEGVEKSTNVSFRVRRICGKSTILVKSGDTVIARFKRDRLAPGEMEHIALPRVLLDRAPMDEVTIEIEEAMKEVICTCCPQGCHLQVDEANDYKVTGNGCPNGIAYGKEELTHPTRIITSTVRAEGCLHSRCPVKTSKPVPKGQMAEVVAALDSVVLHAPIHVGDVVLQNVCGTGADIVTCRDMAMSLEVNIEKKLDGFTLRAAFTAGNTSTALLGASGCGKSMTLRCIAGILKPDRGRIVLDGRVLFDSAQHIDLPPQQRGVGLLFQNYALFPNMTVEQNIRCGLKAEKDPAARRAACAEMLRAMRLETLAKRYPAQLSGGQQQRAALARILVGKPRILMLDEPFSALDSYLREEVEGEVGSLLANFAGTALLVTHNRDEAYRLCKEMIVLNEGQVLRAGRTKEVFADPQSIAAARLTGCKNILPCTPLDSRTVRLDGWGVPLRLALPVPTGCTAVGIRAHDFTPCAADAPNAIPVKAVSTSENPFDWNLICTSPEGTAQLWWKVGKTSLSAAAPGPPQYLCAAPESIMPLKGMDWYPLWNSLRIALISCAAVFFLGIFAAYYIARLPRVIKGVLDVLLTLPMVLPPTVVGYFLLLLFGAKRPLGIFFMQHFGVKLVMNWYSAIFASIVVAFPLMYRTARGAFESFDETLAWSAQTLGQSDPWIFWRVRMPACRQGILAGTVLAFARALGEYGATSMIAGYTPGKTATIATTVYQLWRTNDELGAMRWVLVDIAISAVVLLAVNLLEKKQKAGGRKMNNHRISRRSFLTAAGMAGAAAALTACGGAASSAASSVASSAAASPEASQSVELIVFAAASLTETLNAIGESYTAEHPEVTFRFNFDSSGTLKTQIQEGADCDLFISAGQKQMNQLDITASADVNKDGLDFVDADSRVNLLENKVVLCVPEGSDKGIDSFDALAEHLKAQDILFCMGNSDVPVGQYTQKILAYYQLDEAALAAAGVITYGSNVKEVTTQVTEGSVDAGVVYCTDAYSAGLTPVDEATKEMCGQVIYPAAVLKAAPNAEAAKEFLAYLQTDKAMTVFEGVGFSAVMGKLLAICTSPKRGTVKTEVPSAVLTPEWGIVEDAHGGNWHRQVSMLSAEKIEAFRKKIWVDYGAFGENLVIEGFDFRNLPVTSRFAIGDVVLEMTQIGKECHNDCVIKQQTGECIMPHEGVFARVLTGGEIHVGDEVTLLPALENPPLRAAVITLSDKGSRGEREDKSGPLIAQMLTAAGYVVEETMILPDEAKALKAQLIRMADGRQVNLVLTTGGTGFSPRDITPEATCAIADRNAPGIAEAMRYHSLSITPRGMLSRGVSVLRGKTLIVNLPGSPKAVQENLEYILPSLEHGVRIAAGLDGECARKMFDRYQREIHYLRLSVTDLCNLRCRYCMPDGVEKLEREAVLTYEEFLRLAALFAQCGIDTVRVTGGEPLVRKNVAQLVAGLKATPGIRRVTLTTNAMLLAEQLSALLDAGLDSVNISLDTLRPEVFRQITARDDFAAVQAGLQAALESGLPVKLNCVPQAGVNEGELETLAALAKDNALQVRFIEMMPIGYGAAMPCISGPELRARFARRWPELAPLSTAQEHALGDGPAVYYTVPGWQGSIGFIAAVHGKFCASCNRVRLTSQGFLRPCLASETGCDLRALLRSGADDAQLLAAIRETIWAKPREHHFNDSSMPATRGMYRIGGMNENNLTHFDAAGNAVMVDVSAKPVTAREATAHGIITMNAEAFAAVQSGTVKKGDVLGVARIAGIMATKRTSELIPLCHPLPLTKAGIEFRLLPERQAVEALCTVKTSGVTGVEMEALTGVSTALLTIYDMCKAVDKGMELGEIHLVEKTGGKSGHYIRAEGGYVMKLIRTVDAAGQVLCHDITQIIPGEYKDARFRKGHVIQPEDIPVLLSIGKENLYVWEKHPGILHEDEAAALLYKAAAGKNIHGTAPKEGKIELIADCDGLLKINRKALMAVNSTPQMMIATIHGDLPVKKGQKLAGTRIIPLVIEQEKMDAMQAAAGAEPILNVLPMQAKKVGIITTGSEVFKGRIEDKFTPILQSKLAVYGCEMVFHKVCDDDPAGITAAILEAKAAGCELIFTTGGMSVDPDDRTPLAIKNTGADIITYGAPVLPGAMFLVSYLDGVPVCGLPGCVMYAKRTIFDLLLPRLLADDLITAEDIARLGEGGLCLNCEVCHWPNCGFGHCMYSEQKQALAETQALKRPAVLAVSGVHNSGKTTLLEKLLPVLRSRGLKVGVIKHDGHDFTPDVPGTDSYRLREAGAEGVAVYSGTRYLLAEEFRLTEQDLLALFERHGYDLVLLEGFKSSGWPKIEVVRSAISDAPVSFQPLAVVGDIPGADFDLNDIPALADWIEAQMPALMNQPFCSPVKALRSVLDAAALLPSPSPETIPLEAACGRIAAADLCARMDQPPFDRSPLDGYALHSADTAGASRETPVTLPVVMKLYAGDAPAAALPAGCAARIMTGAPLPEGADCVLMQELTDSGEETVQLYAAVKPLQNVVFRGEDVAAGAVIAPAGTVLTPAHLGVLAGQGYAEVAVCRPLTVGILSTGSELLEPGAPWAPGKIYDANGIQSAARLRQLGFAVERQQCSDDPEVITGKMQELLTRCDAVITSGGVSVGQKDYLPFVLEKLGAQLLVEGVAQKPGSPMLAATLGGKLVFCLSGNPFAAAATLEQYAIPALLRAAGRREESCIPARAVCTLTNGFSKPSKGNRYLRATACGGKVTLPGAGNTEAHSSGALSAMMGCNCLVEIPAGSGPVEPGTEVEVLCFVQMLHPQGRAFKGGGGNPTAFPQKKRCNLKKRTPPIFTGAFWLCAAAARAAHSQRLPPAMLFGRRKPGYTTTVDGSVDPEQAVLELQKAELAAKKKPKAEVFDIDAASETARRLKETGSTFDGSAAKTGEDVIAAVERETAELAAKQAAEAAPEAAEAAQPDAAKPELLDFLAGEPEAENDPFADQPTKTAPELPELTPAQELAGYIRARSAAALITPHALLLEEVENADELLAQMPADPQCTDIVTRAGAKDTYYYSNANMSDNYAMIAQLIEDKDLCVMFAEMVRFNARIYPSATPLKYFQRSPYGLAPEVIEQTWKAMQENPAYADIEELTNNQNERFLFSTKHLTRRYAKAISDVDDFCDMAESYGWAGKILRVNLTTGEITTQDDEKYHKYIGGMGMAYRIMYEEAPMELDPYDEKALVIFGVGPLTGAGVPCSGRMNVTFRSTWSKGHSIIDAHMGGHIGSMLKYAGYDGIVVSGISEKPVYLRIEDGAVSLEDATEIWGKGTFAANKWMVEQNGREFETASIGPAGENLVDYSTLNTSFGNSGGAGLGAAMGNKKLKGLAIRGTGSVKVADPKKVLELSNYMMGNLIGGNNNHNVPAQPQSWAEYSATSGKNRWSGAPGRMWKKAPGGPVDTGEQPYNDINKVALRCFKGYFDFGAPAAEYTVKNGGCSSCPIRCYTEYDVDPLADYDLPTHNSNTCMPVLYGTRVYPDGVHDFKYEGDGTMVINLAWSHAVDDMGLWDNYGNLNRDLLWILRMPREEATKYISEAEYDSLPWEWEKAGDPRWEVELIRRMAYGEGDLSVIAKGTLAMMEKFGLPKSWLDRDDGATNSNLIYNGFPNHHGPAEAWQVGMLYNLVYNRDCMIHEIVCETGSGAPYEVTKKVMEDFFGEGCYDKAKAYTPINENKAKLAAYCVNDKNFHDSATLCNWMWPMTQSPSKERDYHGDLDLQADFMTAVTGETYTQAGLQEDGARITQMLRAMTAISFQQNCGSANLRQEHDAICDWVFDKDPDFKAFEEGTTKLDRADMEKAKDLFYDVFGWDRTTGVPTRETLEKYDLADMADDLEKRGIYAQNTAAAEMAKTDFLTADMTRRQFMKISGKSLAGLTLSASMLSLFGCSQQQVDSGAVATWALPQGLLVVNADLCTGCQRCEINCTLTNDGVCSSYISRVKIQRRLNLDGAGNGLLSGTDNCFVYFPDTCRQCEDPACGNACPQKAITTDSRGIRVVDTDKCIGCGACHDACPWHMPTVNPETGKSSKCIACGACVAGCPSGALSIVDWDAVTSAAQAAYLDLMKQATNPFAPVPLWRKRLPGYAAMGVATIALAVGLTTLQSARTTVAGTLLPVSEADAAAYGISAVYQLDDGSYRVEGSQKGFQSDVQAAVTIDAEGNVSAVEILSQDETESLGGQCVNPEFTSQYQGAAPFTLAGKSYTVTDPVTGAAYAAAGAAEEQPAAAGDFDPAQWRTFDTSPEAEATRKMYAAGLTFSALKGEALGDELAPPLDSSAEAVARRKLYAAMLSKSALDGEPMAIPFADLSAEEQSKARLEQASLTTTGNASGAVSADLTEVDALSGATITSSAVTTIVNNSYFYVTGVLCAEMPGNPGQQLRPLWLLQQRSGLFDNILTCVRGVCQQKQTGFSVLMEKRSTPSLQITDRFGAQTAFASLRLPDGTEATIPAEHAAAIYVNEQPAFRVVCTPALLPQLALGRLLTEGWIASADEVEQIAVCAEGAKVQVYLRHPLPTRRAAAQEVASCCTDNIALGSPVELQPLRPVPGLALQSEWVERLTAAMHAGLPLYRATRAVHSCFVLHKGEIVFACEDLGRHNALDKAVGCAVLAGLPLAECVLYTSGRVPLDMVRKAIRAGVPVLVSKSMPTVQSAELAAEYGLQLVCGRKFPKVMKMETLKQQILTAKGDVRAELVLKNARVINVFTNEIEQADVAIRQGVILGVGHYTGETELDLQGKYVCPGLVDGHIHIESSMLCGPAFEQAVLPHGTTAVVTDPHEISNVAGTAGLDFMLETTKDLALSVYFMLPSCVPATGLDESGAVLEAEQLRPYYQQPRVLGLAELMNSYGTVRADEKILQKICDCTAAGKRIDGHAPFLSGEELNAYIAAGVQSDHECSDIHEAMEKLRRGQYIMVREGTAAQNMESLLPLFREPYCSRCMLVTDDKHPGDLLQGGHIDYIIRKAIAAGVDPVVAVRMGTLVPCQYFGLAHSGAVAPGYTADLIVLSDLEQFTVEQVYKKGKLVAQQGRMLHPAALTVDKARFARVFDSFNMDEITPEQLQLKQTGTRQRVICLTPHALLTTEKIVPFCQHPGTAPGVDVAQKIVKLAVFERHHRSGHVGLGFLGNYGLQCGAVASSIAHDSHNLIVAGTNDADMVLAGNTVRKNKGGLAFALNGQVVGELPLPVAGLMSTESAESVEEKLQALKAALKAHGISEDIDAFMTLAFVSLPVIPKLRLNTYGIVDVDAQRIVPAVFMEQQHKRSAFSGKIGFVLSAAGASVGLGNIWRFPYLAAKYGGGIFLLVYILLAVTFGYTMIVAETALGRMTHKSPVSAYAHFGKGKGIRFGGWINAIIPILIVPYYSVIGGWVIHYLAEYLCGRGSNLAVDGYFSAFITNGLQAELAFLLFSLFTLGIIFAGVRNGVERVSKVMMPVLVVLSLVIAGYSVTRPGALAGVKYFLVPNPKNFSWMTVVTAMGQMFYSLSIAMGILVTFGSYMKKDVSIEESTENVEVFDTAIAIMAGLMIIPAVFAFSGGDPDTLQAGPALMFITIPKVFASMGLGTAVGVLFFVLVLFAAITSSIALTESAVSTFEDELGWDRTRSTVLIGAIMVALGSLSALGYGPLAGVTVFGMQFLDFFDFLTNSVMMPIAAIATCLLVSRVIGVEQIAQEVEQDGQRFRRKPVFNFMIRWLCPIFAAIILASSVANAFGWIAMMKIGFDNDKYLAMQSEHIRERIKKFDNKLYLEFGGKLFDDYHASRVLPGFQPDSKLQMLLQLKEQAEIVIVISAEDIISSKVRGDYGITYDLDVLRLIDAFQEMGLYVGSVCVTKYTAAAEVEAFEKRLNSLGIRTFRHYKIPGYPNDVARIVSDEGYGRNEYIETERPLVVITAPGPGSGKMAVCLSQLYHEYKRGVKAGYAKFETFPIWNIPLKHPVNLAYEAATADLNDVNMIDPFHLEAYGVTTVNYNRDIEIFPVVNAMFELIAGQSPYKSPTDMGVNMAGNCIVDDAVCCEASRKEIVRRYYKCLCQQKITGTAKESERYKLELLMNQAGLTMGAREVEKQAHARSEATGGAPAAAIELSDGTVITGKTGPLLGATASALINALKYLAGIPQETDLVSATAIEPIQTLKTNYLGGKNPRLHTDEILIALSSSAASSELAAAAMHQLPNLKGCDVHSTVLLSSVDSSTLNRLGMYLTCDPVYEEEDRKYHKLMGCNAKQSAERNSGRIGRFGRYIVLFFVKMVPAQNAKGTAAVCGSPLCSYEELSVWRREMRITELFTAQSIALDEALQTQEQILSRLVELQATHGNITDKEAYKKALYAREAEGSTYVDNGITVPHAKTNVVTRPSLAALRLSTPVQYNAEDDGTTDLLFAIAAPENGSLHVDMLARMMQMLMNEDFVEKLKAAKTPKEFLECIDAQEEAQFGAESFTQQAIPQDGYRILAVTACVNGIAHTYMAAEALTKAGDKLGLPTKVETNGSDGAKNILTRAEIAACDGIIVAAEKKVDTARFDGKPVLFTRVDDGIHKPEELIKKIAHGEVPVFHAEGGAAAEDDTAGKDSFGRSLYKNLMNGVSHMLPFVVGGGIMIALAFLLDDYSINPANFGMNTPVAAFFKTVGGAAFGYMLPILAGFIAMSIADRPGLAVGFAGGVLAMNGTNFTDLAAGSTTGISGGFLAALLAGFAAGYIVQFLKKITEKLPASLNGIRPMLIYPLGGILIVGAMMCAVNPVMGMINTAMTDWLNALGGSSKVLLGAIVAGMMSVDMGGPVNKAAYVFGTAALASGNYEVMAAVMVGGMVPPIAIALSTTFCPRKWTLDERRNGIVNYVMGLCFVSEGAIPYAAADPLRVLPSCVVGSAVAGALSMTFGCALRAPHGGIFVFPVVDHAVLYCVALAVGSVLGAVILSLVKKTQPAEAKMIYTVTFNPAIDYVVRLDAPLEVGAVNRAQGEDCVLGGKGINVSGVLAQLGCESVALGFVAGETGAWLERGLAAQGLKTDFVHLENGMTRINVKIKAGQETELNGAGPAIPESALQQLEAQLDKLAEGDILILAGSIPASLPQSVYERLLARLQGRGVRAVVDATRDLLVNVLPYHPFLIKPNNHELGEIVGKVLTTDAEIVAAARTLQEKGARNVLVSMAGDGALLLDEQGQVHRIGCPKGKVVNSVGAGDSMVAGFVAGYLQSRSYAQALRLGTACGSATAFSLGLATKEKIDELLAQLMLAEERFALILEQLNEQRTVTVQQLCEALHTSESTIRRDLTELDRQGRLTKVHGGATLPDSRFLADEPTMEAKETLAVAEKRSIAAAAAALIAAEDFVFIDAGTTTLELVRALTGVALKATYVTNGVAHARLLAQKGCRVYLPGGLLRPQTEAIVGAPAVSSIQQYNFTKAFMGANGVALEAGFTTPDPEEAAVKAAAVRRARESWFLVDDAKFAKIYPAVITDLHGGAILTNRCPNPKYKQYTFVKEAEAMHLYYSKNLVKINQLRSFSIAKNFHHFCAEFPAPWIQELFARKKTTALVYAVVFSAFMMACTTILVGKAASYDGSTMIARNDDSGSGHFTAKKFTVIHPEELPKIYRSVLSHAEIPLPEGALRFTAMPNAVEGKGIWAASGVNAANVGMTATETITSNPRVLGADPLVEYQPAKGEKPEVPGGIGEEDIVYLVLPYIHSAREGVLRLGSLLEQYGTYEMNGIAFQDVNEIWWLETIGGHHWIARRVPDDVYVVMPNQLGIDTFDLEDAFGAQENYLCSADLREFIAKNHLDLSLDGALNPRDAFGSHDDADHVYNTPRAWYMLRYLNPRTWVWEGADADYTPMSDDLPWCMVPERKVTPEDIKYMLSSHYQGTPYDPYLSYGDKSAKGAYRSIGINRNDFMALLQMRPDQPEESRAVEWVAYASNAFNTMVPFYANVERTPEYLANTTGTVSTDNFYWTSRLIAAMADASYNKSLFHLERYEEAVLSAARALVNQYDAKLAAEPDAASRAALREEANTAIAAMLQEKAADTLDKVLFELSSQMKNAYSRSDAMKKILSLLLAFSLALSLAACGGSASSAASSAAVSEVASSAAASEEEETAAPLSATEPLRIAGLKGPTTMGLVNLLSMEQAGTAAMDYDLQLYGAADEIVPLLIKGELDMAAIPANLAATLYQKTSGGIQAVAVNTLGVLYVVEQGDTVHSTADLKGRTILSTGKGTTPEYVLRYLLTANGLDPDKDVDIQYYSEATEVTAQMASTQDAIAVLPQPYVTAAGLKDDTLRVALDLTAEWDKVADTQLITGVTVVRKAYAEEHPDVVAAFLADYAQSVNAANTDLDGTAALCEEQGVVAKAAIAKKALPNCNIVCLTGEELKADVSGYLQVLYDADPAAVGGTLPGEDFYWAAQMNNYLPLLQTTTLFAGLSAAELSTLLSRLGGSVRSYGKGEALVLAGEPSRRVGIVLSGELEAYRPAPGGVRIPIAQVEPGGVFGDVLGGSSLSSPVTVLAAAPCEVLLLPYERLLLSDGSPAHQRVVQNLVRTISDKYFSLSRRIDLLVMKSLRAKVAAYLLSEAARAHSLTFSIPFSRIQLADYLNCDRSALSRELSTMQKEGLIDTYRSSFKLLEPDALQQMVQMSKPVLWIVIPCYNEEQVLPITAPMFLEKIHSLTAQGLVSDKSRVLFVNDGSRDKTWELIQGFAAQDEHYIGISQSRNRGHQNAVLAGLMEALHSDSCDITISIDCDGQDDINAMDEMVKKYLDGAEVVYGVRSRRDTDTFFKRFTAEGFYHVMNALGADIVFNHADYRLISTRVLESFADYKEVNIFLRGMVPLVGFPHDVVTYERHERLAGESHYPLSKMLALAFDGITSLSNKPIRIITGAGIVVSLVSFIGVIWAIVCAAMGSSVAGWASTVCIVCFMSGVQLVCLGVIGEYIGKIYMETKARPRYIISERTWAPYERKYHGMSKQSWKGSTLLNPEPPVLVSCGGLDKPNLITIGWTGTICTQPSMVSISVRPERYSHQLLCESGQFAINLPTEKLVRAIDWCGVKSGREVDKFAACGLHAAPGSVLTDCPVLEESPVNLECRITQRIPLGSHDLFLAEVVACDVDESLLDEKGKLCLDKANLIVYSHGEYLALGKKLGTFGYSVRKKKPAKRKKQMLSFFHFRRQQLRLYNKSFLSAESAQSSAAGIFNRPIPVAFRPILMNQNSSVRKLVHCGVVAAIYVVLCLALQPLSYGAVQVRVAEALCLLPVFGAEYIVGVVLGCFLANLLGSTIVDVIFGTLATLLACLVTYKLRNVRFKGLAIAASLPPVLFNAVIIGIEIAVMFPDPTSSAPIWLACITNGISVGIGELISCTVLGVVLVKLIESNAALRKVFVTEMQPNGMIFWDWNGTLMDDVDFTHNCLNWMLETHGYPQRYDLAAYRELFGFPIEDYYRCAGFDFARHPYPELAARFMEHYNAGVPGCAVTAHAVDTLQTLARMGWQQAVLSASRRDYLIEQVSARGLQGFFTELLGLADIYGVSKVQLGTDYLRRTGIAPAACVMVGDTDHDAAVAAAIGATCVLYTGGHQSRARLEKASPYVIDDLAQLPALLETIMKKRVGILTSGGDCPGLNATIRGVAKALYARMGDNVEIVGIANGYSGLINGDYREMNEDDFRGILTLGGTILGTKRTPFKLMRVVEDDNIDKVAAMKKTYKAAKLDCLLCLGGNGTHKTANLLSQEGLNIIGLPKTIDNDIYGTDVTFGFHTAVDIATDVIDRIHTTAGSHSRVMCIEIMGNKAGWLTLYSGIAGGADIILLPELPYDIDRVCEAVERRAKKGSNFSILAVAEGAINTEEARMKRKDWMAKRTEAGLGTTATNRIAQAVQKKTGMETRVCIPGHMQRGGSPSAYDRVLATQFGSYAAQLVEVERYGVTVAMVNRRVTENRLADIAGKTRNVPENCELLSVARRMGVCLGMKDRSFAIQLLSYPVFPVLTTFFAHLGQKAQLQRQNLPMRAYERLLDYVKVYTTSDPESGTHPSAAREFDLAHKLVEELKALGVEDARVDEHCYVYGSLPATPGCEEKPALGLIAHMDTAPDASGENVNPILHENYDGGDVVLPATGKVMKVSAFPFLASMKGETLITTDGTTLLGADDKAGVAEIMTAVETVIREGRPHGKLCIGFTPDEEIGEGADLFDIPGFGADFAYTVDGGDAGDIEYENFNAAAATVTIHGFSVHPGSAKDTMINASNVAMEFHGALPVMARPETTEGRQGFYHLCQMYGDVTTAKLGYILRDHDAAKLQFKKDNMQDIADYLNGKYGAGTVEVEIKDSYRNMLEKIKPHFHLIETARKAVRMAGLEPVEVPVRGGTDGATLSWMGLPCPNLGTGGFNFHGVCECTTVERMDRCTEIVLNIISLYAEMEKIKNIRKKLRHQRSVRRRKLGLSTPTQIICVSFIAVIALGTLLLTLPIASRHGRLDVLNAMFTATSATCVTGLVVRDTWTQFTWFGQAVVLLLIQVGGLGLVTLTSFFALAMRRRMGFRDLRLLGESVSADGYDQAKSVLKIVVGLAAMFEGIGILLLLFAFVPQFGLEGVWISVFTAISAFCNAGFDLFGRFGAYSSLVPYVNNYYVQAVIMFMIISGGLGFMVWVELCQWYQKRRLSLHAKVVLSFSVILWLGGALGLGLMEWNNPATLGGLSVPGKVMASLFQSVSTRTAGMNTVDLASCGTLSKLLMSVLQFIGAAPGSTGGGVKVTTFAVIILTIRSVAQGRDDCVIADHHIESKTVYRALTIIVLGAVAVIGSAIVVYYNTSDAVSVVDAIFESCSAFGTVGLSVGVTSQLNNGAKILYMLVMFMGRVGPVAFAMSLTAKPDDNKRKIMPVGHINVGMKKVLTVTIDGIRYHASRPADCRHCFFWKNRKKGCVLGKENCYYLIEPPKGPSKCEGCPYKRAKPCVLVPCYKDLMAPLEKRGDAKMPEKKPTRTADLDYFYGQSSELFSFYRIPKLLFQDSRFQPLSTDAKTLYGILLDRMSLSARNGWLDKAGRVFIIYTVQEVQDSLGCADKKATKLLRELEEYGLIERKRRGLGKPDLIYVKNFSSESSKLRFLNRDNDDSGVVQNTLQDPAKLRCNKTDRNNTEVSDTDPIYSDENDWMSKRAQLEEYFSRSLEMDLLLRLYPDDEDTLYQIVDLLVDTCATNRKTLRIAGDDKPAEVVRSRFMKLNADHICFVLKCLAENSSPIRNMKQYLLASLYNAPTTMQLFYQNQTNHDLAMRRMKISKKATTIAIVNQKGGTGKTTTCENLGIGLAMEGKKVLLVDADPQGSLTISMGWQQPDELPTTLSTLMQKAMNDQSIPPGEGILHHAEGVDLIPANIELAGMEVSLVNCMNREKMLKQVLEGAKHEYDFILLDCTPSLGMLTVNALAAADTTLIPVQAQYLSAKGLEQLLQTVQKVRRQINPRLKIEGILLTMTDSRTNYGQQIDNLIRGAYGSKIKVFDQTIPRSVRAAEISAVGKSIFQHDPKGKVAEAYKSLTEEVMANAEKQLKRVAERGRMPKNSLNVSLKGADDIFSTEESRQEQQREQVQQIPIGELFPFKNHPFKVLDDESMQRTVESVEQYGVLSPLIARPRPEGGYEIISGHRRQHAAQLAGLDALPVIVRQMDDDAAVLLMVDSNLQRENILPSERAFAYKMKLEALKNQGARSDLTCGQFGHKLIGAKARDIVADESGDNARNVQRFIRLTSLIPELLDMVDEKKIAFNPAVELSYLDESQQRDFLEAMNDTQNAPSLSQAQRLKRLAQEGHFSYDVAFAVMGEEKKDELDKVVIKNDTLRKYFPRSYTPKQMEDTIIKLLDQWQRKQQRQNERMNTTIDLKTAKTIEAMNQKINHMDNAVTDFFNKMSDVLERQLGDDEVYAAVIAPEIELTITPLANVRSYLPCFDEADSCYSISDDVPMALCYDPRQVITLAGKRYLSGAVVFVRYDTNGSFVALTTSDLYLIQCYLAENSVPLMAGREKMVCICIDMDTEMTRYESFAEVTEDFYCSAVDVLKILVLRLHDYHARCFHSLRDALYDYFSTDAAPHTHANVSTKHTVTASSAPRPPMEQNENTLSVLKIAPGQYPQQVEIDNDLKALQQAVGGSIGASYPFEDPVAIVYNDDGKLMGLPLNRALWDEDGLMYDVIAGTFLVVGLGEEDFVSLSPELAQKYEEEFHQPEAFLPLERRLMVIPVPDESVQNDAEKAVNKPPVEHDRMQEEIEHKTVNLAISTTKLSARTLLRGMQFLLRQYDKRASQGKQSMKRLVRQNRGVTNVEIQKTGIKDFDRYAKRYHIDYSIQKDLSCKPPRYLIYFKAQDADALNAAFKEYSASVLDKTKRPSVLAKLHDLAQSVANLPDKVRHKQEERGLMSKKKLSKLLAICLPYVVIGLLATNLGEAWRLAAGKELGDKIVSLMDTLPAAFSNPLPSLRPFDLFIGLCCGAGMRLAVYLKGKNAKKYRHGMEYGSARWGTPKDIEPFMAPKFADNIILTKTERLMMSNRPPDPKNARNKNVLVVGGSGSGKTRFFIKPNLLQCDSKNFPVSFVVTDPKGSIGVECGEALLKHGYKLKFFNTINFSKSMRYNPMAYIHSEKDVLKLVTALMTNTKGEGQGGDSFWDKAERLLLVSLIAYLHYEAPVEEQNFATLLEMLNTMQVSEDDETYQNPVDLLFEDLGKKKPKSFAVRQYKLYKLAAGKTAKSILISCGARLAPFDIQEVRDATMYDELELDKLGDRKTALFLIMSDTDSTFNFLISMIYTQLFNLLCDKADDQYGGKLPIHVRCLIDECANIGQIPQLEKLVATIRSREISACLVLQTRSQLKAIYKDNADTIVGNMDSQIFLGGSEPTTLKDLAEALGKETIDSYNNSDTRGNSPSYGTNYQKLGHELMSRDELAVLDGGKCILQLRGVRPFLSDKYDLTQHPNYKYTSDYDPKNALDIEKFLNRKEKIHPDDTFVMVDADSLPPAMEFFNSAVDVLKTLVVALGAGLGVWGAVNLMEGYGGDNPSAKSQGMKQFMANMHISYKPLWHTLLERDMRKEDLRLAAGMTTNMIANMSKEGKHISMDTLARICETLNCEITDVIELVPDEPASTGGKEHERIETKNNGKRNMSELKPRITENGIDYILVGDYYIPGLKLPEEHRPIGKYGRMHREYLREVHPARLNTLILTGELLTYLADLNEQAQERLDTIMEQMKATEGVTEELKCTRQMEWVQRCNNIHNRAEEIVLYEMIYSMIEIVFGESACGSLKIAQTYGKGKYRGSAVSIFMRHEDGSVPSSDEMKKAQLQAQEQERIAWENAIPLGGKSSDVYCFDMVLSVGDISDNGIGEQRKNIFKKMLSVCFVEDLDYQVEEKIQKIKTTLTSVIERYVAGEEIRIWYSYNPDELCGMYWLMKQLQPLNCQTTIYLVKLPTWEYGKENTMTSKIAWGEVSPGEWGNYITLQEKANPVFLSACTMKWNQLQNENAPLRAMLNGKLQSVSEDIYDSFILREIAEQPEQFKMAIVIGNVLGKYQLGISDVWISNRIDKMLEDGVLEIIQDAPKGETNYRRILRKRMKMNGATTIQERLKDLRLNKGLKLEELAEQTGISKSALGSYEKDDYKEINHGNLILLADFYGVSLDYLFCRTENRAEINTPLRELHLSDEMVALLKSGRINNRLLCELATHKDFIKFLADIEIYVDGIATMQIQNLNALVDTVRHEIIERYRPGEDDPHLKVLQAAHISDDEYFSHMVLDDLNLIIRDIREAHKKDSESAPQTTVADELKENLEAVENFKGSRDEKLVVLYCKQLGINYKNLSDEEFRWLIRILKKSKKMGTPISQRKKRMPRMSKKRKHELSFYLNDRGRVTYNELCRKCQHGCRQSFRAVVIDCPRYLSKRAKKKEKHTEMNFEFMTIDTPLPPCMPFPRALTGFPVSSTAKVMYCRMLDAMLSKGQEDENGILFVCFPVTAIAAVLSRSPMTVKRSLNELETAGLIMRVRQGVGEPNRIYVLIPGKEDAALAMPDTSKLEKLNRELEKSEKKLRKAINDEKALQHQLKQLTRKERTHRLCTRGGMLESFLQEPERLTDDDVMLLLKLIFHRQDTQELLKKLLEREKPETPMDKKRLKRALGVAIPLAVIIIGISYNSYIKMHTFTLSGGEIVKSEQIQPVGGKVKVTGTADTDVVFTDIESGETYVIGYITSRVGDTIKLERGKWYRVEGIGELTVSPVNVRIEMPCPHNEITIVQRSQRQSAVAAAAYQSGKKLFCEYDQQVKHYPEKRGIVHNEILLPANAPQEYTDRNTLWNAAEAVEKQWNSQLARRWVLTIPREIPPDQYAVLVREFCEQQFVSKGMIADFAIHDPHPPGHNPHAHVMLTMRAMDEHGKWLPKSRKVYDLDESGERIKLPSGRWKSHKEDTVDWNDQKYCEIWRHEWEVIQNRYLEANDRPERVDLRSYARQGLDIVPTVHEGAAVQQMEKRGIQTNIGNLNREIKAANRLMQSIRQLIQNLKGWITELGEKRKELLAQKTAEEATLLPNLLMKYMEIRKEERRDWTRAGQNRGTSQDLKAVSEALSYLRQKGLSTVEDLEAFLESSGKSAADYRNQMKPKEARSKVIDGILASRTDCKECKPVYEKYQKIFFKKTKEKFKQEHPEVARYEKAAAYLAKHPDDKDSTQKELQEEQETLLEEIAELKVPLTEVQEDLKKLRDIRYWVRKATPGTEESKEPPKKQPIKEVLQDKADEKKAQRTAPAQAKHRQQDMELMNVFEAVKQSVTTRQAAEHYGIHVGRNGMACCPFHNDKTPSMKLDRRYHCFGCGADGDVIDFAAALYGLRKKEAAVQLAQDFGLSYEDWKPPGKEKKPKPRQKSPEEQFQEAKNRCFRILADYLHLLRAWRTDYAPHSPEEAFHPRFIEALQKQDQVEYLLDVLLFGETEEKAALITDYGKDVIQLEQRMAELAAADAARTKKHHERHAATPEHMQPPQSIEEIKEGLETTEKGGVRQSIRNCLTVFQRDPLLSGAIAYNILTDRKDIIKPVGFHRESTALNDTDMKYLLLYLEETYGLTNEKKIDNAIGIVANENKYHPIRDYLSSLVWDGTERIRFCLRHFLGADADDYTYEALKLFLLGAISRAFQPGCKFEIMLCLVGGQGAGKSTFFRLLAVRDEWFSDDLRKLDDDNVYRKLQGHWIIEMSEMMATANAKSIEEIKSFLSRQKEVYKIPYETHPADRPRQCVFGGTSNALDFLPLDRSGNRRFIPVMVYPEQAEVHILEDEAASRAYIEQMWAEAMEIYRSGRFKLAFSPAMQRYLKEHQRDFMPEDTKAGMIQAYLDKYTGSMVCSKQLYKEALNHAFDEPKQWEIREINEIMNQCISGWRYFPNPRMFSEYGRQKGWERENPATDSGNPSEKTMDGFVEVTEQMELPFMAKNKTEIHVTTVFDGELDATDVFVSLISQKYGKTNTKEYLAKRKDISYNEDEVQKSQIPSGLCGMAMMNEMEYRTIGSALAGGYRAAVYCRLSKDDDLQGESASIANQRDMLEKYCEKQGWEVVAVYQDDGFTGLNMERPDLQRMLRAIERRQINLVITKDLSRLGRNYLQTGHLIEDFFPRNGVRYIAMNDGIDTLRDNNDIAPFKNILNEMYSKDISKKVHSSYLLKAQKGQFTGCLAPFGYRKDPEDKNHLLIDEETAPIVRLIFGYALNGHGPNYIRRRLEEEKIPCPTWWNRERGLRNTRTKWEKKDPENGRYMWDFSVIKDLLMNPVYTGAIASQKKDYRFKIGTIGEKKPEDWIVVEGQHEPLIDRMSFDIVQNKLKSRQRPGQTNEISLFAGLLKCGECGKSLTVRYTNAKHPQQIYSCKTYNAFGKNHCTQHRIDYDTLYSHVLRKIRECARAALMDGEAVADRLTNTCEAEQREQREAMERSLTRDEERIAVLDKMVMRLYEDMIAGRISEQNFNTMLEKTQTEQTELKTKVSEGRKRLSDEVQLANDAKQWVEAIQEYANITELDAATLNRLIKEIVVHERIDEDKTRHISIEIHFNLKPIPEVEQVTAMKKATLHTSEIHLLKRRKLRRELIYWRTYGSNCVYCESELAEQTGQQGHQSDTDQGNAAASHQLFYPQLGVKLCSMAGGGVQKSMWCFMEFFNSAVDVLKTLVVALGAGLGVWGAVNLMEGYGGDNPSAKSQGMKQLMAGGGVALIGITLIPLLSGLFGMIAAVSSDLIQSEIALRTVSTQRHHLSRKMVDKGLEQVEQKNKVSQNLHNSTVLSVMSNLSGLFDDVNTQVGNIAQQVGTKPSSFEPRVFAMIEALSRNVVLPIAGVILTFIACYELIEMITQHNNMAQFEPALLMKWIFKTAISVWMISNTFDIIMAVFDVTQQVVANSSGIISGNTRVNDIGLSMLQSSMMQMDVGPLFGLFLQSFFIGITMRILSIVIFVIVYGRMIEIYMMVSLAPVPMATWGNHEQSHVGQNYLRSLFALGFQGFLILICVAIYAVLLQNVAISGDAINSIWSIVGYTVLLCFTLFKTGSVARSILGAHMAAYISVPRDFSKVKSKVAFNLTARQLICFGAAAVVGVPLFFVLRDTAGNSGATLGMMAVMLPMFFLAMYQKNGQPAEKILRYYFQARFVRPKVRPYQTRNYYALLVKGDDAHDSVSEKEMIPFLKKNKDGRKPPKSTVPRTAQESIPFQRMFEDGTCRVRPGYYTRTIQYQDINYQLAQQEDKTAIFEEWCSFLNFFDSSIHFELSFVNTATDSADFEKSIRIPYQQDGFDDVRAEYSQMLRQQLSKGNNGLTKTKFLTYGIEGDSMAQVKPRLEHIQNDLMNNFHRLGVLAKPLDGTERLRLMHGMLNMDGANKFHFNWKDLVPSGLSVKDAIAPTALAFKNSRTFQMGGIFGAVSFLNITASDLSDQLLKDFLDMDSSQIVTMHIQSVDQNKAIKTIKHTITELDRSKIEEQKKAVRAGYDMDVLPSDLATYGRDAKALLKELQSQNERMFLVTFLVLNTGKTEQELETNVFQAVSIAQKHNCELCRLDFQQEQGLMSSLPLADCQIEIQRGLTTSSTAIFVPFTTQELFDNGKESLYYGLNALSNNLIMVDRKKLKNPNGLILGTPGSGKSFSAKREICNAFLVTDDDIIICDPEAEYAPLVERLHGQVIHISPASTQYINPMDINSNYSEEDNPLALKADFVLSLCELVVGGKEGLQPVEKTVIDRCVHVIYRKYFENPTPENMPLLEDLYNALLTQDEPEARHVAAALEIYVKGSLNIFNHHTNVDINNRIVCFDIKQLGKQLKKLGMLIVQDAVWGRVTANRSAGKSTRYYADEFHLLLKEEQTAAYSVEIWKRFRKWGGIPTALTQNVKDLLASPEVSNIFENSDFVYMLNQANGDRQILAKQLNISPHQLSYVTHSGEGEGLLFFGNVILPFVDHFPKDLELYRILTTRLSEVAEAQKHEMSEKQPKLRFEEEKERTATRSPPKKSKVEQSVPKKQKLKQDADKAAEKSQHLRFGKAEITPDEASRMTKQQKRAMYAAAAARSAAHREIDQYEDDNVGTQALSEGEKAAETTHDISKSRYARKLKKKAKMQGKKGAKTAKSSVQKPPAAQDAGASGTGEGSSNWLSRWKQRQEIRKSHYATAHSGTAAQTAGGKAVSNGTTAAKSGMEQVIDKGKSVVSTAVNGIANFAKSNAHVLLIVGVFLLLLLLVMSAFSSCSILFSGTTQVSGQTIYTAEDRDIRGAETDYKKLEKELDXXXXYPHRPPRLMQAKLKETFAKQYKLTTWVEVQTRYRTVVMIDIFTGIPYTVQVPYEYRIFHTKLVNKGLEVVIREELDNDQWKRYEIFQDTLGGRPYLFNGGLPPGGSDGSGTPGIDYQVPAEALTDSEFAAIYKEAQKYVGTPYVWGGSTPETGFDCSGYVCWVYNQNGYDVGRTTANGLWNKSQHISEAEAKPGDLVFFEGTYDTPGKSHVGIYLGNGMMVSAGDPIKYANIHSSYWQKYLSGFGRLSKMSEKLDKLRASLEKERERRIKINTRIESLERRIQEAEAAEVNEMVRTAKVTPEQLAALLRQSATATPTPAALSAVGATFNKEDDSNEDDEMKMMNKVCALVLSVALCAGMAAPAFAYGGEPVEEVEQPVLTSTTDEEDAVTVTDEENGALTPEGNLTLVDDYHTSYSDGSGQQFITLVSKSGNTFYLVIDRNAKGENTVHFMNLVDEADLLSLMEDEDAEAYTAEKEAAAQAEQERKQTEEDAKKAAEEAAASGSEQTGGNKVTKYAATFLGVLALVGLVAGGGIYTFMKQKQKKQAEKEALDPDANYTEDKGDFEIPVEDEPEETGEEDNAEEMSYAKVLGATSRQDGYLEGNGYLVSWCVGHLVELAPPNVYDAKYVKWSIADLPILPEKWQYLVSASTKKQFGILQKLMHRPDVESIVNSCDSGREGELIFRLVYQQAGCKKPFSRLWLSSMEENAIREGFAHLKPSTKYDALYNAALCRERADWMVGINASRLFSCLYNQPLAVGRVMTPVLAMTVVREAAIAAFVPEKFYTVALTLADGGTASSKRFAQKADAELLLSKCRKEGRVTVQKMERKEKSESPPQLYDLTALQRDANRLLGFTAQQTLDYAQSLYEKRIITYPRTDSRFLTEDMAASLPGLVTDTGRAFAVEEPIPIHVQQVIDGSKVTDHHALLPTKSMAKADLAALPAGERNVLRLIAARLLCAVGEPHRYAETTLTTICAGEEFSAKGKVVLSEGWKAVERNMLGELLGKQKEPAVLPDVQEQSQCSVAGAELKEGQTSPPKSYTEDTLLSAMQAAGADSMPESVERQGIGTPATRAATIEKLVQKGFLERKGTKKTKVLLPTDKGKALITVMPEEIQSPEMTADWETKLLQIERGEMEPSEFMIEINTMISSLVKTTEAAKGANALMKNKIIGVCPNCGANVVEREKGWFCENRECRFVLWKDNAFFKRLGKRLDSHVADKLLRDGRVRLKECRSAKGKTYNATVLLSCEADGHSKFSLEFENGGRMKDDAVIKDNEAVYLLNEQTYLHLRENLQGVGYEVFDKNSPLPVEEGQIPREALGNTQRRIETARAYYLAEHQDEPVGRIQNVAVTTLEKFRSGVRKRRNLAPRSLPDNDVRFIDPMYNELFRVPDGGVVQVTYPDGHQRSEVVEYLGDYHMKIGSSVTHICELAERMARSHAIVEPEPLTQQEQRAWNLEYDYYLTVQAADNGSWEYALYQGDCCLLERGKIDAPELMIEEVRDEILYSHNLRNKDCIPLTQEEFTQKLADRNEIQSYRMKQFQQSGHDCYLVMQLQQDADPALHFAAMRYLNKQSIAPSVENYEILYRGNLPEGKRSVPQAELLEQLYQKFNFARPTDYHGHSLSVSDVIMLNQDGKISAHYVDSIGFKELPGFLDKKPERLSVLQNLKEKCDAPECNPTVCRKVRAEHELMNFDHEELMLMMLYNSGTRMGLIHELRLMQCYLMPDETALRELSEGVIEKLKLLTDAEFAELEFPPDMNHVMRLKKLDQYNPSFLPFEKLKAYGIGAVRGPRRMPHSLICELERNRYEQMTSLTIEQKRVDIYPSAKPGSPVIYLNTFSNAVNSVYKNLMALGCPDFSLVAVSKLKWDHDMTPWYMGPISKHDTPCTGGADDYLKLLLDEIMPEAEALLPGAPAWRGLAGYSLAGLFTLYALYQTDVFARAASMSGSFWFEGIMEYVCSHEMKRKPDCLYFSLGDKESSTDNPILNVVHQNTQEIETLCHGKGIETTFVLNSGSHYQACNKRTAAGIHWILNRMDTIYSLFQKVVKEHENAPAIIENDRTMTFGELSNMVDMITCSFPQEVHSIGIVMRHRTEMIASILAVLKCGGRYVPAEPDFPTGRIHDMMTEAQVDFVLTEHAFAPKLNSFPIRYTDCEICGVETPSWKRNAVEDPERPAYVLYTSGTTGRPKGVCVTNRNVCHYVRAFANEFHPGPGDVMLQYSVCSFDIFVEEVFTSLLNGAALAIPSDEDKADIHALMAFVERHHVTMISGFPYLLAEMNHLSVIPSSLRLLISGGDVLRGVYVDHLLDKAEVYNTYGPSETTVCASYYRCNSGTVLADGTYPIGHPVLGAQIRILDQSGNAVAKGQTGEICIYGGGVSLGYIGDHAEENRAFERQPDGSTMYRSGDLGYILPDGNIAFLHRKDDQIMIYGKRVELAEVESRLYRCKDVQQAIVRAFTDEDGLSYMTAYVVPSDNKLKVSEVKKELSENLTSFMIPEFFVKMKQIPLNINGKPDVSKLPVVMKAGALMEIQIRQATIQDLNVLMQWRMEVLHEVFSIPSERSVTELESENRRYYQTELPQGGHIACFAYVGEEIVGCGGICLYHEMPSPDNLNGKCAYLMNIYTRPQFRGHGIGNRIVRWLVEQARQRHISKIYLETSNKGRPLYQTIGFADMKDMMKLSREKMKRFTNHPEPWGEFIDVKFWPEIKHPERYAGKELFLCYVTDPYQPLEETVCRTRAILEQMQGSECSLSVATKSDLVLRDLDLIKTFPNARVSWSIKHTGRRFSRMDNAVSIERRLAAMKAFHDAGVCTTCFISPIFPGLTDLPSIIHRAKNQCNLVWLENLNLRGGYKKTIFDYITEKHPDLLPLYDTIYNKKERSYWSMLDAQMRQFCQEEGLLYVRDDDSIKRPFNDPPIVVNYFFNEEIIPRPKCRRTGNQNYIVTCRKLEVVEVRLMDVPKNKLGLQGEEMLEVVDFKCDPILIGTLREEPGFFPAYHMSKDSWITVALDVQRIRMKENRKLLKEVLKDIRHDMTDEEVLNLLADSKISVSPESEKEKYTLGQRAADSIAKFAGSWAFIFSFTGVLILWMVVNTVLAAKAFDPYPFILLNLVLSCVAAIQAPLIMMSQNRQEEKDRRRAENDYKVNLKTEIMIEDLYDKVNAILAKQSALEKRLQNDGKNHTKQQENNMLMPTVFHENLFDDFFDPFWNDAALERMMNREARDTFGKRGANMMKTDVKQTDNGYEVAVDLPGCKKEDVQMDLNDGYLTIQAVRSHSNDEKDKKGRYLRHESFSGTCARSFYVGDVKKEDIHAKFEDGVLHVELPAPQQTKALPENPNLIAIEMESMVVYSCFAANFSAISSRRSMGDLFVVSIGYALYGTGFHGALRPSGLAACGLIRRLHKSDTFVLAVDLPSGINTDTGEVAEGAAYADLTVTFDSYKPLHMAEASAPLCGKIICADIGIRDEWHPEFMPSKTEEYLALAQRTANGLTRYWESWTDYLTTASRLYKYTFADQLMIYAQRPDATACADYDIWNNRMNRYVRRGSKGIALLDESSGFPRLHYVFDVSDTGVRRNSRDPDLWQYNDDLKQPVSEMLAATYGISGERVSQQLADVAGKLVADYWDNNSEDISAIVDGSLLMDYDEAGVEMQFKSAAAISVTYTLLERCGFEPDGYFDKDSFQAIYDFSTPDTVYTLGAAVSDISREVLRTVERAVKTTIRRRNNERSQHEYEQQSELHADRGLSSPEPDPASAEDPAGQVRQDAPELSEAAAPGSVPHDAPEREPVPDPDRTGADRSSDEEATDGRSAGEEPGPGQGEESDGVGTAHEQPTGAGRGSDSDGTDLQLSFLDAVIPTEAQQIEHIDRAESEKSPSAFVLSQAEIENELRKHGSGFQDGKQRIIELYQTQPDRKLRAKALAKEYGIGGHSQDFLDGSSGFVNHDGKGLEFDHYPDHQKVTLSWTQVEKYIDLMIQSDRYLTDKEKEHRAAVQEAERQLPMLDGDAAAEYNALKEQYPNTLIGFELGGYFLFYDKDAITVKEVFRSNLLSQENALGKVKVTGFLRREWVAKSQKLWAEGNSIYLAGQGGDGTHHQTKYLREEDYLPIGIIIKLDGRDFRVDHVNFMFKSVSLQDMDLTNSGQPIFRVERLPNIRELYEQQQDEIIDVSPEKAVDYKVGDEVVVDLPTRTIEGKIGYVGETDVRIDTSAHGQSWDNEVLNKQQFEDGLRRDEPTPDEELDKLPISVEVNGEWQTFPDAAAADEALNAEPMPEAAGNFHITDDNLGVGGPKQKFARNIEAIQTLRTLEQEHRGATAEEQQVLSQYVGWGGLADAFDPSKDSWAKEYAELKGLLSEEEYAAARSSTLNAHYTSPVVIRSIYEAVEKMGFQSGNILEPSMGIGNFFGMLPSGMADSRLYGVELDSITGRIAQKLYPQADITVAGFETTDRRDFYDLAVGNVPFGQYKVNDKAYNKLGFSIHNYFFAKTIDQIRPGGVIAFVTSRFTMDSKDSSARKYMAERADLLGAIRLPNNAFKANASTEVVSDILFLQKRDRPADIEPAWVQLGQTEDGFNINQYFVDHPEMVLGNLELESTQYGHDLTVAPIEDANLADQLTEAVQHIEGQYTAVEIAAPDVADAEVQRKTLPADPTVKNFSYTVVDGEIYYRENSIMTQIELSDNAKGRVAGMVELRQIVNELIDQQLNDFPDEDIKASQAKLNYAYDAFTAKYGLINDKKNARLFDDDSSYYLLCSLENLDENKNLKSKADMFTKRTIRPERVVTSVDTPSEALAVSIGEHGKVDLPYMAELLGTPGNYERITTELSGVIFKDPAADADDPEAGWQTADEYLSGNVRDKLRMAQLAAESHPEFKVNVDALTKAQPKDLEASEIDVRLGATWLAPSIVQQFMMETFQPPYRIRYNNAITVRYSPYTSEWRISNKSATGFGDIMATETYGTRRANAYKILEDTLNLRDSRVYDTIEEDGKEKRVLNQNMIITKETDYALRILRVLLDGEMIFMFATSFLFIDYGFIIPQDKVFFCDEVTLIKKSGAFMEVRYYICKHCGNIIAKVKDTGVPIVCCGEPMSEIVPGTTDAAVEKHVPVWTVENGIVHVKVGSVEHPMLPEHYIEWVSLQTKQGNQRKELHPGEKPEVCFALCEGDEVEAVYAYCNLHSLWKAMYKMINSKKAVMIGCGFVGSASVFALMQSGLFTEIVLIDADKNKAEGEAMDISHGIPFASPMKIYAGDYDDVADAAIVIISAGAGQKPGETRLDLVNKNVSIFKSIIPEIAKRNFAGIMLVVANPVDILTQVAIKLSGLPENRVIGSGTVLDSARLRYKLGEHLSVDSRSVHAFIVGEHGDSEVVAWSSANVSGVPLSEMCEMRGHYKHKENTAEIATAVKNSAYEIINKKHATYYGIAMSVKRICEVIMRDEKSILPVSHMIHGVYDIDGVALSMPAIVGADGIESDIPINLSGEEALKLKESADSLKKIMETIELMINRRNTIQKDLVRNAVYEMKRHVTANEVYEFIKEAYPTIGKGTVYRNLDILVEEGSLRKVEVPDGPNRFDFTLKNHYHVRCVKCGAVSDVDMDEIPDLLERIHNTHGIEFLDYDISFKGICLKCSEKVKKEKYGMKIILSPAKKMITDTDSIAPVTLPEFIDKTTEILNWLKDRSKEELKAIWKCNDKILEQNFNRLENMNLYQMLTPAVLSYEGIAFQYMAPSVFEDMQFEYVQNHLRILSAFYGVLKPMDGVTPYRLEMQAKVGIGDAKNLYEYWGDLLYRSVIDDSRIIINLASKEYSKCIEKYLIPQDRYITVTFCELSGDKLVTKGTYAKMARGEMVRFMAENNIENPVEIQKFDKLGYFFRSDLSSATEYVFERKIEMLELGIKAPDFELLDQNGEVHKLSDYAGKKVILYFYPKDNTPGCTKQACGFSERYPQFTEKGAVILGVSKDSVASHKRFEEKYGLAFTLLADPERKVIEAYDVWKEKKNYGKVSMGVVRTTYLIDEQGIIIKANDKVKAADDPENMLKELDMELNILKKWRNYMKAHKYWSVGALITMIGTFYTGYKGLKAAHKYFAFGSLICMMMAVYSGHKMISGNKRTRKQVKNTKAEEMNIYLWKEDIEDGKSVMTAEYRPVEYGKDYDVVNNPDKFQLYIGGKEIKMDLKAVGQRIKSAREAKNLTQEELAALVNLSPTHVSVIERGLKVTKLDTFVAIANALDVSADTLLIDVVAHSITGVTNEMTDKIEKLPIKEQKKIIKIIHTLLEEMKSHKYWSLGALFCMLGCIYSGIRKSMTAHKYFAYSSLLCMGMSIYSGHKLVSPKKKKITESNNSENNMARPKGSKNKTRTVKAAVDYAAVVAEKTAEKEKIESEVASLTANLDDLKTQLKVKKAELKAATKELTKAENKKAAAEAKAAEEAKKGEAEDVLKKLLASGMTTEEILAKLQMNVSKAIVSHAVALLKKNGFLKMNQDYDFVLTDSGRAIASCIYEKHCYFKDISCKEIAMQALKTACTFYGGDLAGTLEVDLDFDVMKLKKLLAFGLALVMCLAMAACGTNPDENPEESTSQTDAEPVSITVTENWDFSVGFYPVITPMVSSTYGAGFWSRNFYNTLVSYDDNGKIQGELAETWEISDDGKTYTFHLRDGVKFSDGTPLTSEAVKMTLEAVVTNLGPQNGAFGKLTTLFDKLETPDEKTFVMTLKTPYYAALDNLTMALPLGIVNPAAFEGGVEKAYENCVSATMGTGPYMFDRVEGDTYTFIRNPYYWGEAPEVDEFKVKVIPDNAAKILALRNGEIDAILGSSRLSAEGYTEISQDTAFGHAMDDSTNQTRYLGMNLNKAPFNDPLVREAVSYAVNQQELETSVFDGLETAAETLFTNEKPNCGVEVKTYPTDMEKAKQLMKEAGYEDTNDDGILEKDGTSLAIHFNYSQSLASIDNAVLSIAASLKELGFDVTIDAVDMNTWYGDLMAGEYDLTFYNTAGGSFDPATDMSNMAPGAMGDPILCQFSAFFENPEIFAELDSTSDSQRVQEIYGMILNGIADQNLLVPVTGTHDLALWNTDKITGYDFYTDASYVDIASVHVKMIKVNNLSKEFHEQGTNNELLVVDHVDFIIQDGSFCALVGESGSGKSTLAQLMCGLLVPSSGEVLFEGKNISLCRGKQKQVLRSKIQLILQDGKGAMDPRFTVYQIIAEPIRNFRKLTKKEEEREINDLLAMMELPEEIKLRKAHELSGGQQKRVCIARALAAQPDVLIFDEAVSGLDVLVRKHILDLLKRLHQERKMTCFFITHDLDVALYLADRVMVMRCGKIIEDRTFHGSTDCFTHPYTKLLLHSIAPYLGMMSSLIIDRLSIKLRSGSDNLVSEISFAIKEGESLILLGQSGSGKTMTCSAVLNLLGPKKFEVSGSVFFGETDLLNSSEKQRRGIYGNQIVYIPQNPMTALDPSMRIGRQMDETLQLHSDKSRQQRYNYILQLLHDVGLDDPDRVYRAYPHMLSGGMLQRVIIAMAMMLDAKFVLADEPTTALDVIHRNGIIDLFSQMKANGVGILMVTHDFATALQLGGNMLVMKEGRIIESGEVQFVFDHTTEPYTKSLIEAYSLSCVFTKGAESMIHKLLKRPQAIIGLCLIAIVIVIAIAAPAFSPHDPELVNLSQKYAQPDAEYPLGTDQLGRCTLSRLLYGARYSIGISLPVLLILSVIGLIVGTFSACAGEKADHFITILCDVFIAFPSLIIAIAVIGVLGNGLQNIAVSVVIATWAWFVRVVRSYSVQEMGKDYILAARISGCNTGKLIFRHLIPNILPQFLVYVSTGVASSIIMVSSFAFLGLGLPSGTPEWGAMLNDARTALYSHPELLIYPGLCIFVTAAGFNLFGEALRDILTPEEDSLMKKYIGKRIISFLIVLIGVSVLSFLLIAWSGKDPAEIIAHRGVSNPTPEQIEMIRVEMGLDQPLPVRYIQWLSGMFTGELGTSLTTHQPIVKDLHKYLATTTSLVGMAILWIIVLTVPISLLCARKRNRLFDQVTRGITICGICVPTFWLGFLLLLFFAIHLKWFSVLPSPGWRGFLLPSFALAVPSSCSLIRIMRSSLLAELSSDYVRFAKARGLSANRILVCHILRNALPPVVTIFFQQFGFLIAGGAVIESVFSIKGIGTYLVDSVVAADTIAVSTCIVVIAAIFVVANFMADIINRLLCPWMVREENDTMMKTYLKNAFQLSDSGAKGLVKSIWSFFLYYVSFVPPMICVFLFADRLLHGNTGKPVVYLLFMLVATLVMYLVINYNYKTTYDETYQESANLRIDLAEQLSKLPLSYFSKHNLSDLAQTIMADVASIEHAFANAVANTIGFAIYFLVISAALLIMNWKLGLCVLLPVLASASVLFLTKKLQVRDVNKHYDKLRDISESFQNAIELNQEIKSYGLKEKVEAQMDQQLDESENLQWKAQITQTIPVTIGQTLSILPIGITATVGLSMLASGQVSILILLGYIIMAAKLSGAMGGVLLYLTEIFYLDARIARIGEIKNHELQGGEKAVLSDFNVEIKDVCFSYQKDTQVIRHASFTAEQGQVTALVGPSGCGKTTMLKLISRLYDADSGTVQIGGTDIREIHTDSLFKYVSIVFQEVILFNTSIMENIRLGRLDASDEEVIRAAKLAGCNEFVSRLPDTYQTIIGENGTKLSGGERQRLSIARAILKDAPIIILDEIAASLDVETEVQIQTGLNHLIQGKTVIVISHRLKSIENADKIVVMKAGTVEACGKHAHLLKQSSTYRKMIEKSNLAEKFNYMKSIRCLYKKLLQYVPDKRIWAYSSMALSAAAVCSYMGAYWFLWQCIVSILVIPAYEKAMYDAIIVVALMILRGILNIASATCSHYLGFRLETNLRKNGLHKLLDASSSFFDHNSSGEIRKVIDDNAAETHKTVAHLIPDNITAVMTPVLMFVLMFAIDYRLGILLILITVIGVLQYRKMSGGTEFLSGYSAALQKMSAATVEYVRGMQIIKIFGVTVQYYKTLIDSIKEYKQYVYQYSLSCKNPYVGFQVLFNVFYAFAVPAAVVLISYGEPAMLILAKIVFFAVFSGAVFTSFTSIMFTGQDNFGAQNTLNQLDELTASMDQAKLPHGSEENFQNFDIEFRHVDFKYDDTFVLKNFNLTLHQNKTYALIGSSGGGKSTIAKLISGFYPVDGGEILIGGKNIQSYSEKALIQNIAFVFQHSQLLKTSIYENVRIGNSQATRQQIMDALDAANCTSILDKFSQREMTVIGAKGVYLSGGEVQRIAIARAILKNANIIIMDEASAAADPENEYELQQAFQKLMRGKTVIMIAHRLSSIQNVDQILFVQNGKVVEQGTHNELMAYNGRYKDFQDVYCKANQWRLAMIEVKREDFFIESIKNPIEYGTYYKINQKYGIGFQWTNEVHHDFVITVTDIRFNQETVVGEHIGPGYVLALYISGAGDEFYPYQNVSPNTLRCYEPSEKYKAIYHPQIPLRCITVQFDQEFIDQYLQEISGDLEVNFSDFFKEKGKFYLPNVNRAMQSLYEYLLSMKASRITVEAKIYEIISILASYLKENRLNEENARSINETDLQALDELTHYMDEHYSFNITLQTLSTIACMSESKMKKLFKSVYNMSITEYIQRKRISVAEHMLIQTDLTIAEISRIVGYSNPSRLIEIFKRYYGFTPSKYREMTRQELFTWIRQQYGTEPEYPWHDWNAVLRHNDNNKWYGVVLEVSADKLGLPKAGIVDVLNVKSDPLLIGSLRRQDGYFPAYHMNKEKWLSIQLGKPELDDAIKDLLSLSYELTAPKKRNLKSSGKNPGDSANGKEKGIDEGMDTIKRVQDLMQERDMNLCVLAKKCGISYSTIQTTARRGGQLSVETIERICQGLEITLKDFFDSSYLMKKKTTLTKMHIAPAIVRYDAVAARDSNEVGLILADIRKRNGYSLVAFSELLRHYGVDVSDKGINKWEKGYTTPSIYQLVAICYALNIKEGPSYFTRNFQKPALLNDIGQKKVAEYEMDLIASRRYQPDTEEPAEIDHIVMPVSDLPVSAGPGAFLEGEMFQRIQVPASSVPAGAEFGIYVSGDSMEPRYHNGQIVWVKRCEELECGDIGIFVYDGCGYLKKYDEHTPDKSQAELLTDSYGVVHNQPVLVSLNTKYSPILISPEQRFEIVGKVLNMKKENVRCPMCGTMNYDVDLDETSGWTKCRRCKAVTCSMDEWKKHTVSVPLLNEKQLVARSMIRKMCGDYNLRREKRYVEVDVRFTPDGKIRPLAINYDKAHTYGIDRVLAVKHGTSRLGGKGHCFTCLICGQKRNLWLEQGKWFVEAYCSVPESCASMARYLSRTDLSHIAGRYIEQYYNCFGISRDAPEPIDPERLASSVLGLNVKMLPLCSDGSVLGLTVFQKCGFTVTLGDGTKLVEVFMPKDVVIDSALAADCCTGCRNFTIAHEAAHHILADLFPNDYGKAVKCRGHIAYRERNGQPSWEEWQANTLAAELLMPTFLVNAEIERAALCLSNGILYKSASDPNYEKILEMAARMGVSWSAIRIRLQQMQVINGKPIHCHPLDVIRFGEMSFNNGNERRKLNAKWEQLRVQYREAGMSEEAIQAMYEFDLGVLNSERAYDANTVAVCDGEDDVDARKAADLKQYEAAITVTDTYHETKSCFSWIGEIENERLLAALESLSENDLKLLTLYVYEGYTESEISKVFSISQPAIHKRIEKITIFLKKFMDELNPTVREQEIYEEMELTPEMVKSIRTLCGTCLRHFVDAKAFKIALVPSPDRSMDTCTVCQMRRGYDYVVMHRMQQNWKFQRGDIFFTHFGASTGSEQHGDRPAVILQNDVGNYHSPTLIVATMTSKAEKKVNQPTHCLLENAGLNMPSVVQAEQIFTIDKSRALKYLGHLTPEEMRRVDDAVRISLALNPMGSIQQMEPIRRSTAIYAPPEVVDGKPPVYPYTPIRSSFENAGSIEEMMLYTELQSAVHAMIQRLEYSFTFNPSLLTSPKRKQQVTEILEEAEKYIWRIKEEMRCAMRLNDNNTFIGINPPYQLSVIHSSKLIYPREIYQRGVERKRVELIAKDFNEYIVNEPKVSFRNGRYYVMDGQHTIEGCILLNGGEDRPILCKVYTGLTMEQEALLFAEQNGHAAPLSAGIKLRAKVVGGDAPSKAFVAATNRVGLSLNYDSMQLSDYRISCVGTALKLYDQLGEEIYCEALRHIVEAWEGRPDSFRAAVLRGVMYFVQLYHGQYSAERLVRALGSVHPMEIYRVSRDNPAKLPGWRRYVYPIYTTYNGKCRKDALPMKFMGEETLNPRDAYRVMLRDYPDVLNIDQMCEILSISTKTGYALLKKGSVQHLKVGRSYRIPKAHLLTYLIGFAPGHTIRAMVAGHLQEKNDFYYIVLSYKDADGKRKTKWEATGLSVKRNKKKAEALLLERRRNFVVPTAPAEIRLDDDILFSDFMLKWLEVTKSSVQITTYASYQGMVEHIIAPYFRKRGIKLVDLKATDLQDFYTKQLERVKANSVIHYHANIHKALKYAVKIDLIPTNPADKVERPKKNEFKGSYYSAEEIHALTEAAEGTKLEIPVLLASFYGLRRSEVLGLKWDAIDFEENTLEIKHIVTQASIDGKKVLIQADRAKTKSSLRTLPLVPHIRDRLLMLKGQQDTYRRLCGKSYNRDYLGYLCVDEIGNIIRPNYVSEQFPKLLEKNGLRPIRFHDLRHSCASLLLANGVPMKQIQEWLGHSDFSTTANIYAHLDYASKLSSAQAMLEGLGYGNASAMTAGCCTRLCAAVCFCVQAVLYCVRMIQAQHPALHRAWRGTWRKVLTAAGFFVILYKVYYGDVSKRSMSYTFSRRAFLKYSAATAVAVAGASLLGGCEYQDPKNPVCKTLPGAIKSDLQVIAGLKSMKIENGTCTLEVDIESARANPIRLTTDCFSIAVKDSEDNQRYFSLRNGVQILDAENSRIEQKKPITIHLAAANFPKLQDGDTVLFQYIPIRENSEFSMTWEITKEVYEEFIANQSTSKNMTGEFSRRSFLKYTALTAVAVAGSSLLTGCSGYAPVQHAPGTSNVVLKVVSTLDRVEYKEDDNITLFRVVVTNGRNNALEVTKANFAVKAEGYLADQNDKLQVTSPDALSYQVKQGETVTYHVMAKGLNALTDGPVTLTFYPDLQYPEFNANWELAAEVLEPDLSDPSTTMSTVISRRSFLKCTGASAAVLGAASLLGGCKSNGNDTVVEVKVGDTVRNWNGLGVQLTSVFHLTQDPVQPAGYEYLGVRVTTVNRSKTESYAIGAQGIDAINEAYPVPPLENVDANFQAMAAATPDFTAVCDGQPAACCANISLYNANSQSFSDVESLPPQGSAYIVLMLMVPKDWKQLKITYVPTFLEGKSLTFVMNASDVIRSMEFNRIIKLLRKERGITQKQAAEDLGVSQALLSHYEKGIRECGLDFVVRVADYYNVSCDYLLGRSAERNGMMLSAEDLPNPEKMKDNVYHGSVLPTMNKKLISNSLNVLYAKIGQCHSKALTTEVSAYLMMAVAKMFRLLYSAEPHNASSMFSIEPHRWHGYSDAVMRMAEANVEALLDGQDVNGGEGVKDPACLAMTTESLTREFPLYTPSLLNLVKTSETHVKGLSPQEMKLERKVRLCSAAAAVLIAAIALTGCGGSKTTASSAAASSVAASTAAATNNSCGEGVTWALADGTLTISGTGRMTNFTKDAPAPWADQADQITTVEVEGTVTSVGATAFKDCTALTTVNIADGVEYIEAGAFNGCTALTEVNIPLSVGYIKTGAFKGCTALTSVTIRDNCRLDMNVFPDTVEVNYAEGMKTFKLHLIRHGMTAGNLQGLYIGSGTDLPLCDEGRAQLAELKERFAYPQVDTVFSSPLLRAVETANILFPGAAHQFTVHDLREAGFGKFEGRPVKDLVHDEDFKKWITPGSGYLPEGAEPTEQFHARCADSLMKLFEYMIRMDVTEAACVTHGGVIMSMLSQRAVPTRRPEQWMADPGCGYTVQTDVQLWMRDKLVEAIDIVPFGYADTLQGQAEAEENEAYEMSQSISRRSFLKCAGSGAVSLAAALLTGVCAAAQQPCLAGEPALLDGKAAVELLGYAPAPELGGVLVYLSVENLSAASLPVDTSYLQSRGLRTREQLYSMGTGVTAACNGQSVPCGSFAAPLYNENAADASVFTLNLAAGRGALLHCFCAVPEDWQTLALTWHPDFAAGRSAIFTVRRDADEAALGPVPTTPAEVGSVVDLMVAKENQKTTSDFDALEPRKRGCSPLLTPKGWAAPEKTEDSRLFGVKIFMKRKWSLRLGAAVLCAVLLGSCGSTAAAPAESTAPADPLTGQQLLYPEQRAAAVVIENTTDSTTQWGIGSASVVLEAMTESGSSTELCLVYPALSAMPVVGPVTRGQDLYWRLLSGQQVLPIQCGSSAYAKRYLEYYNLRAVDAQEVGRNAFVSTGYSWDNTPLWRTSGKAVASVLDSLSISTAVNQNTTSGSESETAGVLPTLLPQRDTGHLPDANAADAVKATVNFQSGGATGFVYDDALAAYGMLHADGTPQLDANTGTQAVFDNLLILYSGSSLRDDGRTLDYDLSMGGGVWLNGGHLWQVTWTQGTQSTLALYDSNGKPLNLPAGRSYIALLSSLTGQELLVQSSTGEALVGAGMKKITRRTVLRASGLAAASLALSGCAPAGSACVGNGFSDWLKQTFGKDSAASSESAEAAAPDAGTPDAGAASELPAESADTSLPAYNADPLTGEPRRSNGRMVGVMVNNISNTQRQNARPQRGIGSADLLIESKVEGGISRFCAVYYDANAIPEVGPLRSGRDQFLQLLMPWQALYYHDGESAPCTKFINVYNYSGLNIGGKSYFNTPTHPHVAHRDSRGRNVAYEHTEFTSGAEIRKAAANAGIGLQYPYESTFFRFADYRTGAENKMSGAAAAKTINIVHSDSYKTTFSYNRWDHLYKMSMYSRAAGAFENTVDELTGKQLGFTNLLVCFAGIADYPGNSGGVQQVDYVSGGEAYFFTRGAVQRGTWQKASPEHPLKVYAADGCEICFNRGKTYLAIVDDDEWPNFNYQMGFFDKLFGGKSKDENTAKFTNQSKTVLTPLQGKVLAQADIPDETFAQGILGPGCGIEPTGDTVYAPFDGTVTQIATTLHAVGITSNDGIELLIHVGMDTVDMKGQGFTVLVKENQKVTAGTPLLKVDLDAIRAAGHPTATAIIVTDGAGDEVKMLAEGDVAPGTPLFKVMILQNALVYTPRHTFELGTIVIRDGRIVPFAAPEEGEEVLDAEGLYALPGLVDIHFHGAMGKDFCDGTEEAIQTLADFEASKGVLAICPATMTYPEEILNKVMDAAAAHKNGKGADLVGINMEGPFISPKKVGAQNPEYVQGADAAMFRRLQKRAGGLIKLVDVAPEEPGNLDFIKECHNEVRISIAHTCTDYDTAVKAFEAGATHMTHLYNAMPGITHRAPGPIIAAMEHDAEVELITDNVHIHPAMVRFTFNTFGDDRICLIADSAMSCGLPDGQYSLGGQAITVKGPRATLTEHPDTIAGSNTCLYDCMKRAVLEMNVPLESAVRAASETPAKSIGVDNDYGSLAAGRYGNVILADKELNLKAVIQKGVRIVMMKYLQKLGKALMLPVAVLPICGILMGIGYALAPAVMGAEGATSGAAYTIGFLLIKAGGALIDNMAWLFAIGAAVGLADNDGTAGLAGLVSFLMMQQLLNPGVVSAVRHIEEGTATYIAYQKVAGNSFIGILAAVIGAACYNKFKDTQLPDWLAFFSGKRFVAIATGLISIVASVVLLFVWPVIFDALVALGKGIAGMDGIGAGIYAFLNRLLIPTGLHHALNNVFWFDTIGLGDLTHFWAGETSADVGWSLGMYMSGFFPCMMFGIAGAALAMVKTAKNKKAAIGLVVSAAICAFVCGVTEPFEFGFMFLCFPLYVVYSALYGIFTIITYYTGFRAGFCFSAGATDLVFSASLPAAAKTWMIIPLGIAAFLVFYFVFYFAITKFDLKTPGREDDDEEAEKKVVLANNNYTEVASAVLAAVGGKENVKDVGYCATRLRFEVKDNAKVDEKAVKAAGAAGVIRPSKNACQVIIGTKVQFVYDELKKMLMTHFNRKKKKPLSFFAKICYYSVTELWTACNQRLSVNTNISMVGCNPLDKIDIKRKDFSALKSGRVQKKQKILTDVPSNKDFMNLGAFMDPEFPIFSTTLCYLEREDAYLMLHRIKKQDDYNHDKWVGVGGKFERFESPEDCLVREVREETGLTLTRYRARGLLTFVWGNMTEFIHLYTADRWEGEMIRGDACAEGELQWVQKSEVQKLPIWEGDKLFFRLLEEEHPYFSLKLVYDGDTLKQAVLDGKRIVMGIRSGNTSQRAAAQRFMQQPFLMKRDTHMPPRSGGIRMAKASQVVIMEGEYYIIKSPNGKVLEVKDFNTENGAGIQLWSYAGHPWQQWQFVDAGEGRWRIQNRFTGKMIDLALGGVVEGTWLHQWSRTSGLSQCWALEPTRSGRTRIRNVLADKYIDLVGMNTANGAQAQIWNYVAGGNQEWMLERIDPDVAQTGKRAGEAKDPQPTPSQRKHQNDLVRKLNSAGKGRAGRKAMVALLYPICPLATRMLFHNLSFVFCAFCRVFAAQTFSGASNVFYRRALCTPAQVVVQMTNETLQTIRSRRSCRAYEPRQITDAELDAVLEAGTYAASAMGRQSAKIVVVQDAATRAQLTRMNAAVMGTDSDPMYGAPTILVVLADAHANCAVQDGSLVMGNLMLAAASLGLGSCWINRAREEFDSAEGKALLKKWGIEGDWIGVGHCILGYPAAEPKPAAPRKPDYIVRVMKPDYKLVAKAKYIHNTADLASELWHEVYKRYYPAKQLDTLVEELQSADAIEADIDNDVNYFLVFLGGKLIGYFAWKMENTALHLMHLYLKPEYRGKAIGRDIVQTCERLAKGEGKGRVWCTIHAKALPVQQFFKALRYRELRPAEQENGTVPRNELVYEHTLSMAKDHPTGNSGLYRAFLQLKTPEECYRFLQDVCSYSELSAMEQRYNIAELLADKCIYTEIMDKTGASSAIISRVSRVLSADDSVLRALLEAEKKAADMAKAVVFFAEGTEECEALLVVDLLRRAKVEVLVASASGSREILSSHKVHITADALAEEVDYSDVDLVVLPGGIPGTPNLAANKTVTDTCVAFAKAGKKVAAICAAPSVLAALGLLEGKNATAHAAFQDKLAGAHVLDTEVVVDGNITTSYGLGGAIPFALELVRQLAGEAQADRIRSAIAYRHMRFVTCRLPDGVEDPAILSQDGTQVWPLSWLGLSYETLSDAIPFLTPQVRFGLQLAISGIPALPVEAVTLQSPIPCPAQDVVCLGINYMAHSDEAEKYSADAFSTKHQDAIYFSKRVGRAVPDGGFIEAHTDLVQKLDYECELAVVLGKDAKDVPAGQTKDYVFGYTILNDVSARDVQTAHKQWYFGKSLDGFTPMGPCIVTADEFDTYPPALPIRSRVNGELRQDSNTKLQIFDIDHVIHELSQGMTLKAGTIIATGTPAGVGMGMDPPQFLHPGDTVQCEIEGIGTLTNTVRMRRIRIKGVNDMKEYAFGIDLGGTTAKVGLFTTSGKLLEKWEVSTDTSNNGAHILENLAAAVQQKMQEKGLSADKVEGVGLGVPGPVLDSSIVPIVCANLGGWGNRNVSIELSELLGGIRVLVGNDANVAALGEIWMGAAQGCRSAVMVTLGTGVGGGVIVNGKVIDGAHGAGGEIGHITVNPHETAVCGCGKRGCLEQYSSATGVVRCMKKLLDANPDTACTLRGKDFEAKDVFDAARAGDALAAREVDEMASTLGMALANIAATTDPEMFMIGGGVARAGEVLFTPLVRHYKEYAFQSCKETPIKAASLGNDAGIYGAVRLIVGAMFSFVASLFFRLSRIFTASEKVIPLYKNQLSARYFSINAQNKQDGSCLFAPICNAFYKKDAVPPQPPADELPLAQDDFEWPPLALWPCSAEKIFMKKLFAMTVAVLLLFSVLLGIPAAYGQAPETGKTLDILFSHDTHSHLNTFTTVVDEKEAEIGGFARANTLIKAQRAKDPDTLVIDGGDFSMGTLIQTVFETQAAELRMLGYMGYDVTTFGNHEFDYRSKGLANMLTSARTSGDAVPAIVVCNVDWDAMESAGLTEGQQLLKDAFAAYGVQDYTVLQKGDVRIAVVGVFGKDALSCAPTCELKFKDPVQAVKATVAEIKANETVDMIVCVSHSGTWDDPKKSEDELLAKGVPELDLILSGHTHSRIREPIRHGDTYVVSCGEYGKNLGSLSMAQKADGRWQVTDYQLIPITSDIPADVETQEVIDRFMDTVDEDYLAQFGYTKDQVLAENDVVFSSLKDLGKVHTEHNLGDIIADAYVYAVENAADYNGVPVDLAVVPSGTVRDTYARGDITVEQVFNSFSLGIGADGVPGYPLIEVYLTGKELRTAAEIDASVSDFMTTARLYCSGLNFTYNPHRLLLNKVTDVYLVKDGQRVELQDDKLYRIVADLYSGQMLSAVTDMSYGLLSIVPKYADGTPIEDFEDVILTENGKELKGWDAIARYMASFEDTDGDGIGNVPDYYNTLHDRKKVEDSRSLSALLKKPNRFAFILLGLILTVILLVVCLVLLLRKLVRKLRRRRKTHMIDSVIFDMDGLMFDTERVWATLWEPALATLGLSYKEGLDVAARGTAGDTMRAVLRRFYGENCDTDAIIEALHAQAEKAFQAPPPKKPGLDEILTWLDAQHIPMAVASSSRMASIRHHLDGWGLTHYFKVIVSGEQFSASKPNPEIFLRAAEALGTARDRTLVLEDSYNGVRAGAAGGFVTVMVPDMAPANDEMRRLYTAECCDLYEVLEGLQKGRFMLVSIIIFPAGFARNQKMFHLSTGKVAPDCEHNGVQTAKSMVQMLDIKITRTATPKAKPTDETKLGFGKKFSDHMFVMDYTEGEGWHDARIVPYGPFELDPATVVFHYAQEIFEGMKAYRTADDTVQLFRPDCNAKRFQDSADRLCIPKIPVEDYIQAVEALVDVDRDWVPHTDGASLYIRPFIFANDVGLGVHASKHYIFCIICAPSGAYYAEGINPVRIYVEDEYIRAAPGLTGFTKCGGNYAASIKAGELAEEQGYAQVLWLDGVEKKYVEEVGSMNIMFKIDGKVYTAATVGTVLPGVTRRSCIELLKDWGYEVVEGKIAIADIMAAAREGKLEEVFGTGTAAVVSPVKELVWKGEHAFIGDGKIGPVTQKLYDTMTGMQWGKLPDTKGWIVPVEKKYMIKKWSMSYPAVNGTEQRRAYVYLPTMYEAQPERRFPVLYMFDGQNVFFNEDATYGKSWGVADYLDYTDTPLIVAAIECNAGANNERLVEYSPYRFDDPTYGHFDGKGQATMSWFIHRFKPLIDQNFRTLPDRAHTFIGGSSMGGLMSLYALLQYNDTYSRAAALSPSIWVAPDKLSGLVGRAKLAPGTVLYMDYGSREMGNHDGIRREFSNLSGKLMTRGIHLTSRIVPGGTHCEASWEKQLPFVFHTLLYEVEEMEMQYFKEYSPELGRDMECKLYGHAGRPMLYIPCQDGRFFDFENFHMTDTLAPWIESGQIMVLSIDTMDQETWSDAQGNPYWRIRRYEQWLRYITREVAPMLQHLAQQRNGWSDLPGVIAFGCSLGATHAVNLYLRRPDIFCGCLALSGIYTAHYGFGDYMDELVYMNSPVDYMKNFPENHPYMQLFRSQKAVICCGQGDWEQPDTTWLLKRIFEAKHIPIWVDLWGHDVNHDWNWWYKQVAYYMPYILGQQMQNFIFISPNFPTNYWQFCRELKNNGLNVLGIGDQPYEELKPELKASLNEYYKVNSLENYDEVYRAVAFFTFKYGRIDWLESNNEYWLERDAALRTDFHITSGFQTSDMPRIKYKSKMKEYYQKAGIATARYHMVDDLAGCKAFVAQVGYPVVVKPDNGVGASDTHRLSTDKELEEFLAYKEKEHPDVAYIMEEFVRAEVNSYDAIIDAHGNPIFEAGNVSPVSIMDIVNNDDNSIYYIIKDLPEDTRAAGRAAVKSFGVKSRFVHFEFFRMTENQSSMGKKGQIVALEVNMRPCGGFTPDMIDFARSTNVYKIWADMIAFGGTDMPVGEHYYCAFAGRRDGKSFVYSHEQLMQKYQDNMRMVDRIPEALSGAMGNQMYVATFSTRDEMEKFYSDVLAVTDATNAKVQAELTKVLALGEPETVKAEKMAQAKQDMGSGSVKKLMLQLMIPAVVAQVVNLLYNIVDRIYIGHIAGIGAAALTGVGLFTPILMLLNAFAMLVGAGGAPRTAIALGQGDKEQAEKIISNSFTMLLLFSVVLTVVFYAGAPTLLRLFGASDATLPYALAYSRIYILGSVFVLLVLGMNPFITTQGFAKTSMLTTVIGAVINIILDPILIFGLGLGVRGAAIATVLSQAVGAVWILHFLTGKKTILRLRKDYMRPEKKVILPVMALGVSTFVMMSTESLLSISFSSSLARYGGDVAVGAMTVITSASQLCTLPIQGICQGGQPVMSFNFGAGKKSRVKEAFRFQLLLCSCYTCLFWLLMMLAPGAVAGIFTSDTALIDYTTWSMRIYMAGIFAMGFQIACQQSFMALGQAKVSLLLACLRKIILLIPLIFILPHLLPDPVFGVFLAEPVSDILAATITTITFFSRFNGILERGAAKVMDAKAAAARNAAPQRVRSGKTGTAAGEKHAFLRSTENFAKRDWYFCGFMSVKKQGFSSGLCLVHSGIFQYNKEAEKKNKRCDRNGLPRCFVFCGAAAPGEKRSAVQMINMVKLPTSKSELFLRVAKGHFATSHSHINYYIDVTTQKTRLSEAKAVAKELVSAYQHNTIVDTVLCLDGTQVIGTCLANELTKDGFTNMNAHKTIYIVTPEYTSGSQIILRDNLAPMVKGKHVLILAASITTGYTIQAAVEAVNYYGGIVAGLSAIFATTHECLGYPVTSIFDPTSLPDYASFDSRDCPLCKAGQHIDALVNSFGYSALMKLYKKAAACLLTAAMAISMLTACGGGGNGGNGGNGGGNTPSPLPNNPDQIILPDIDEGEGGSEGTGTKPTKTPIIDVNNSKLVQFTKKYAGATEFYVEMQEVGYGKDARSIDVRAARKGENCYVSMATLGKNNKQQLIETLMLKNNSTWDQYLLFRSSKAAVKSRSEDDIDLSLGALIASKRPTQMWSTEIKVGPTKYYAEVYKYYPYEYTTCFTADGKPVYQFVRDLREKQLDSATLYKTIRVGSGTSNGLCALPTGTKAYSFDDNTGSLTDAKGNVFTLKEDGTTGIKVYDKAGNEVTDDFKWLTDFFKMMSGEMKIPANGFTHAGKFHADDVFATALLQILRPDIKITRGFTVPDDFDGIVYDIGFGMFDHHQEPREYRPNGVPYAAFGLLWRVLGPGLVGERQARLIDENFIQPLDLNDNTGEQNSLCDAIGFFNPVWDSKEDQDSCFFKAVAVAKQILENQIDSANAVNRADEKVQQAYRNSRDGIVVLPCYLPWKNGLYKTDALFVVYPSQRGGWSAQCVTDHKTKKSKLPFPQSWAGQPQEVIEQKSGIPGISFCHASRFLITAKDKETALAACRQVLKNNGRLAMVRCTGGQLYTGWTNHPAARLKAHQSGKGARYTRAHGAVGFAYLERCADKRAALRREAALKKLSKPEKEVLCAAWRAAGCPGVQNDMQKRLISMVLALSMALTAMPLPALAQSAPPDTAKAARWAVEAGLLPDMGEGAFTPGKRVTKVQVIRAWNRLKKLGLAKMKNLLKMSDLSPAELTHILDVADQLKADCKAGRTAPLLAGKSVALLFSKASTRTRTSFEVGVYQMGGLGNYMNTAELQAGRGEPLRDTARVLGRYYDCAVWRTYRQRDLEELAELSGIPVINGLTDYAHPCQVLADLMTIRERRGTLAGLKLCFVGDGSNMANSLIVGGLLAGMQVSCVCPPGYRPAADVLIFAHKYGNAFHLTTDPAEGLRDADIVATAAWNTTAPGTAESEQRLRDFVGFQLTGRLLENAKPDALVLHCLPAHRGEEISTALFEQHADEIFDEAENRLHVQKAVLAVLLAGKMDSEKVIKRDNEYVLHTYNRNPIVLEKGHGLYAEGPEGQKYLDFTSGIGVNSLGYCDLAWAEAVSQQAHKLQHTSNLYYTAPCGKLAKKLCKRTGMSKVFFGNSGAEANEGAIKAARKYSVDHYGKDRYNVITMVNSFHGRTLATLTATGQEVFHNYFGPFNEGFQYVPAGDIEALRELVDRHTCAVMMELIQGEGGVMALDPDYVQAVRALCDEKDLVLIVDEVQTGVGRTGTFLCCEHYNLKPDIVTLAKGLGGGLPIGAVLMNEKVAEGMGPGTHGSTFGGNPVVCAGANVVVDRLDQSFLAQVSERAVQLRTGLAKLPHVKNISGIGLMVGIEFFDVQAADVLAACREKGLLVLTAKTRLRLLPPLTVSEHEVDMALEVLAEVLGTMEPTAPKEQAMKNEEMARLFSEATPYIQKYHGRTMVIKYGGNAMINETLKNAVMNDLVTLTLLGVRVVLVHGGGPAINEMLKKVGVESHFANGLRVTDDATMEIVQQVLAGKVNKDLVAKLRGRGVGLCGMDGQMLRCTELDPQLGHVGEIVHVDATLIESLLDGGFIPVIATVGMDDLGQAYNINADTAAAQIAIALKAEKLVSMTDIAGLLRDKEDETTLIPEVEVTEIEGYKSAGIIAGGMIPKIGGMADAIYQGVHEAVIIDGRVPHSILLELFSDRGSGTRFYRRSHREMLNDGGSKMQYKEVAGGICAPKGFAAAGVHCGIRENHSEKYDLALIKAEVRCAAAGVYTTNKVCGAPIKVDRAHLADGYAQAIVVNSGNANTCAANGVALAEECCALVGKALNMDEKDVLPASTGVIGQPMVIDPFARGIPAAAEKLAATAQGSTDAATAIMTTDTHKKEYAIQFELGGKVCTVGAIGKGSGMIAPNMATMLAFYTTDAAVSPALLEKALKTVVPGTYNQMSVDLDTSTNDTLIIMASGLAGNPEICEENADYAAFVAALTAIAEHMCAEHAGDGEGATHLITCEVTHAPDLKTARAVSRSVVCSNLFKAAVFGRDANWGRILCAIGYTPGDFSIDKVCVWLSSKAGEVYVCENAAYHPYSEDEAAKVLAEHDILVKVDMGTGEASAKAWGCDLTYDYVKINGDYRTMKVKVFIDGSSGTTGLRIADRLAERPEIELLSISAEGRKDVHERAKVINSADLAFLCLPDAASKEVMPLLRPDVKVLDTSTAFRTDAAWDYGFPELKGQKAKIQNSYRVAVPGCYASGFISIARPLVELGLVPQSYPFSCTGISGYSGGGKKMIADYESPDRPAHSKLDAPKSYGLSLGHKHLPEMQKISGLAHTPMFVPVVCDYYCGMQVLVPLDLTLAGTTAEAVAAALADYYKDAATVKVHGLNEPLPENGLYSNAMAGTDRMELYLTVNAAGDQMMLVSLFDNLGKGSSGAAVQCMNLMLGLEETKGLEMAEQLWKGRFSKAVDSRVNDFNSSIRFDQRMIAQDMRGSGVHAAMLARQGIISEQDCADILSGLASIADDLSSGALTIDPAAEDVHTFVEQTLTARIGDAGKRLHTGRSRNDQVALDIRLTLRDYSKTLQAYIVELVRVLCKKAAENTASVMPGYTHLQRAQPITFGHALMAYASMLLRDLDRFADATARMDSQCPLGSGALAGTTYPLDRDFTAEKLGFAAPCANSLDGVSDRDFCIELASAISICMMHLSRLSEEIILWCSWEFKFIELDDAFTTGSSIMPQKKNPDVTELIRGKTGRVYGDLNTLLVMMKGLPLAYNKDMQEDKEAIFDAVDTLELCLKTITPMLDTMKTLPANMRRAAAKGFINATDCADYLTKKGMPFRDAYKLTGCMVSDCIAADKTLEELTLTQFQSYSPLFGADIYDAIDLVHCCEGRTSYGGPSAASVEKQIALATARLDAWEEENAMKKENIKKVVLAYSGGLDTSIIIPWLKENYNNCEVVAVSGDVGQGTELDGLEEKAKATGASKLYVLDLKKDFVENYIFPTLKFGAKYEDYLLGTSFARPCIAKALADIAIKEGADAICHGCTGKGNDQVRFELTLKALCPDMAIIAPWREWDIKSRDEEIDYAEAHHIPLKINRETNYSKDKNLWHLSHEGLDLECPANEPQYNKPGFLELGVSPEQAPDVPTYVTIHFEKGVPTAVDGKEMGAVELVEYLNKLGGANGIGLLDIVENRLVGMKSRGVYETPGGAILYKAIDVLETITLDKESSHFKAQLAQKYADIVYNGQWFTPLREALDAFANSLEKTVTGDVKLKLYKGNMINAGVTSPYTLYDEQTASFGEDEDYNQADAAGFINLFGLSIKERAKLSKNWPEVKMRISIRILCLSFAVDAFIIRSAGFPSMLKTAKHSARFAFLLVQSVSLCKMSKLKEFLVRKDIVISPQRYLIDALGAMAQGLFASLLIGTIIKTVGQQTGLALLVDLGGYATAMSGPAMACAIGWALHCPPLVLFSLITVGYSANALGGAGGPLAVLIIAIAAAELGKAVSKETKVDILVTPLVTIFAGVGLSMLIAAPIGAAASQVGTLIMWATEQAPLVMGILVSVIVGVALTLPISSAAICAALGLTGLAGGAAVAGCCAQMVGFAVMSYKENGVGGLVSQGLGTSMLQMGNIIKNPRIWIAPTLASAITGPLATCLFHFEMNGAAVSSGMGTCGLVGQIGVYTGWVSDIAAGTKAAITPMDWAAMVLLCFVLPAVLSVVFCEVERKLGWIKDGDLKLNMQRCAAPGLCPLPGAGPLLFHAAHGFRIKRTADDNFTLPLVYTRTRGAVNGTAGFYTNSPPGQCVGKYSKWNTFRQGRTLHKAEISQFFQQPLAVLTGVWYDTGHTFVTLTICFGMKKRFDRSGTARRKAVTAVAALTMALVLAVGGAGAATLLSARPETLTVGAVVPHITAEAPQQTAPADPAPAAESTATAPEQTAESTAQPQQAESVPEQAEKPETAEAEPAEPEEAAAAPETPETPAQPAGDAALEEENSPAMLLEETPELAAQDPQAPAADGTAQNDTTSQHTPEGSVLLTPEQIQQALDSGALEDAEAQCIDLTDENGFFRWLFNWLFGSKDKEEEPAPAYSGWRTENGKTYYYAQDTNKKVTGLRSIDGKLYYFDANGVKQDNVTFGIDVSKYQSGLDWNKIKKSGVSFVIIRIGYRGYGAAGNLVKDPMFEEHFTNARNAGLKVGVYFFTQAVNEAEAQEEAEACNWALNGRMLDYPIFYDTEASTAPGGTGRADGLGAEDRTKCAIAFCERVKELGYKPGVYASTTWYRKRVNYNTLRSRYTIWNAHYGVSSSPIGCDLWQGTEKARINGYSGELDANISYIGMFVVTLSKTSLKKLGAGAACCALVVFSAMLGRFISTRTVAVAAPVNRIESAQDIQTWFTGYGLEVDGASITADKVKIPRRWDDSFSAFNGVVQQSGMDLARYKGKTVEKWSALLPAASNGETSRYGVLLVYKKKAVGAYLLEKPSGTVLGLQDAQNELAKQTSGEDYSGDWGERHDEQLTDSTAQQTSGEPETEPEAAPQAAPYTELPLDAEGYPVEMKEFQYTIKDACGIHARPAGLLVKTVKGFASTATLEKDGKSCDMRKLMALMGMGVKQGETVTIKVEGDDEEAAAEAIQKFLSENVMQVGTGKSVLNGIAIGKLKIYKKKDTAISTAPVADTAAELERFEAARQKAIEQQTALYEKALAEAGEDIAEVFNIHAMMLDDDDFVDAIKEIINGQKMCAEYAVKTAGNNQAAVFSAMDDPYLQARSADVLDIAQAMLDILQGVDNASLQGTEPSILVAEDLAPSETVRMDKSLLLGFITREGSSNSHTAILARSMNIPALIQCKDIQDDWDGKMAVVDGYNACVYVDPTPDLLKSLKKRQQEDQKKQALLQELKGKPNTTLDGKTINVFANIGGMGDVGAVQQNDAGGVGLFRTEFVYLNCKDFPTEDYQFEAYKQVLESLAPRKVVVRTCDIGADKTVDYMKLDHEDNPALGYRAIRICLTRKDFFKTQLRALLRASAYGNMSIMFPMITSLRELQDAKAVLEECRAELTAEGVKMGQNIEVGTMIETPAAVFIADELAAECDFFSIGTNDLTQYTCALDRQNAKLEPFFNPHHPAVLRAIKMTIEAGHRHGIWVGICGELGADTALTETFLRMGVDELSMNAKSILPVRKIIRSVDLSKPSEKAMDIETIYRLYFRDVCLFLQGLTRSETLAEELTQETFFRALDGLKNYDGKQDVRAWLFTVARNAYYDHCRRAKHAAPLEDAETKAADSPDIAQLLVDKDAAFTVHQCLHALEEPYKEVFSLRVFGELPFDRIGAIFGHNAAWARVTYYRAKTRLQTMLEQRKMKLECDVIRDLLPLYAEKLASPASSALVEQHLAACPACRAELEQMEKPVPVQPEPQPDAPLKNIRSSLNRRRLRTMLCSFAAALALAAVCGFGWYGYTACDRVSFFDARLQAYYQQAENGANGWVLETRAEDVYLKPTHADWHYEAIRYRIPWVHDALDKVLKKDTDLLRSTGWMRTDHSAVVDAADMTVAFNGQDGTWYAVGSEPAAWDEVEWPEMKRFLLWIISVALGVVVLLAAVMGVSYAFTTEGGCPDGAAQFGGQALEANGSCWQVPLLGGQLDKVFASPATLTVQKLGVLYTAHPELSLPDWTCYTALTIQNAAGDVLFAGSAGEYQNFLFPANGEYKAELTAWRVPKGGVITQFEGGSTGQLRKNLGLERPAKPTGWYRYSFRFTLQASAEVELSAERVEQGGTVGVRISGMTGDAVPTIETDLGSVQCVRAAEGWRAYIPAAYNASSGGHEIHITVNGETITRTLTVLPKDFGTVEAEAEEPAADSANAQFRSAIWPLYEAAATAKQWQGGFVPPAEDSMTLVDYGQIKVTNGQQGSRSNSTKLYTIPGAPCRAAANGTVVFAGNLELTGNTVVIDHGCGLRSYLYGLQELSVSKGQTVEKGQAVGALGEELTMDFKLGSRSVNPRLLFQTSGGLFWKENMKKSCLVAVIAVLAAVAGALAAVALYLNRREKELDEYERLLFGEDDAETVEPEEAAAEDETEAEMNRAKTGTLPKLCPAAPSGRENWGATVVILGGNGYNKSYKAALIAACIKILLRDARWKNQAETTFQLQKGVYMENISPALLEWFYKNRRSLPFREDPTPYHVWLSEVMLQQTRVSAVLPYYYRFLEELPDIPALAACGEEKLHKLWEGLGYYSRVRNLQKAAKLVCAQYGGQLPADYAALRALPGIGEYTAGAIASISFGLPVPAVDGNVLRVFSRLYNDPGVITEPTVKKAFTARVMEHQPPEKAGDYNQALMELGALVCVPNGAPLCGQCPLAEVCLARAAGTTAQLPQKAKPKPRKIVPVTLALVESPAGFLVQQRPEKGLLAGLWQPVLWEGEHLLQAEVLARLTALGLDTGAAQPAALPAAKHIFTHIEWLMSGVQLRVPAQSAPAGYVWASREQLRTTYTLPGAFRAYKPLLLMERTEILSLFKSTPADGTEITVCGWAKNIRDSKNIGFIALSDGGCFKTLQVVLEAGKLANYDEVIHTGLYSSLRIKGKLVLTPQAKQPFELNAESVEILGDCPADEYPLQKKKMSMEYLRTMPTLRPRTNTFNAAFRVRSVAAYAIHKFFQENGFVYAHSPLITASDCEGAGEMFRVTTLDLDNLPKTEDGAVDYSKDFFEKPVNLTVSGQLEAEAMAMAFGKVYTFGPTFRAEKSFTTRHAAEFWMIEPEMAFCDLNGYMDNAEAMIKYVIRYVLDNCPDEMAFFNQFIDKGLVERLELVANSEFARISYTEAIEILKKNNKKFQYPVEWGVDIQTEHERYLTEVVYKKPVFVTDYPKEIKSFYMKQNADGKTVAAADMLVPGIGELIGGSQREEDYGKLVARMDELGMDKTNYEWYLNLRKFGGVEHAGYGLGFERMIMYLTGIQNIRDVLPFPRTAYGFMKHTHRIIRLLTLAVVSCALAALLSGCTKEEFIAGYNEFLFGDWFPSPPSAGETTAAEGSASGDSGHVYAEPNPECDAKISSLMSELYSLESSARSDVSSAIQSAKDEYHALPASQRTFANKVSIAYKHLSSVESTYDSAVSSVVSEMRSVLREYNQPETIADQAWSYYQSAKSSMISSLGGMRSREPWRLPAGQSRAVPFLQAAVLFAALCIFARSAALVLAAFLAAPVPAAQTLLHLGQQAVESRVAESSAESAAEAASAPSPAQEAAAPVQTGVEQYFVALQPDEARPADAGAVTEQQFGQGSGEKYIPCGAGSIKNNTRQTAADIAAEAAQPLPFAIEKDSAAPQVLIMHTHATEDYRLSAGLWFTPGDGARSTDRSINMCAVGRVMADTLNAAGICTLHDETLNDYPSYTGSYANSRAVVQQYLAQYPSIKVVLDVHRDAIERENGTRCAPVCTIDGRQAAQVMIICGCDNGTSVQLPAWRQNLRFAAAWERSMEAKYPGLTRPVLFSYRFYNQDLTTGSLLIEIGGHGNNLNEALYAGYLAAQGLVETLLGMRTTDMADELFSAAAQPLPAGVRLATARHGGVTVTRVEIAREGLSRPRGRYVTLEMPSVSVLDERDAAVIEVCARELRALLPPEGPVLVLGVGNRRITADALGPRTVQRILVTMGAGAAPPVRGLRPVAAVAPGVAAATGLSLQQLAAALVGQLRPAAVVCVDSLCSAEGQRLGRTVQFSDAGLYPAQADHTRHLTRDTLGVPVVAAGIPTLMQAQEGADLVVTPRALDSVIAHGAALLAGSVNRALQPRLTVQQLCWLTGMPNIKSQKDRVVQAAAEQAHNKAIKTNLKTVVKKADAAIDANAADKDATVLAAVSAIDKARAKGVIKKNTASRKISRMAKRANKNAMKHSGQTVLWELWAALCLCTALVLPPGSPWLHEPALLYPGLSLAAVVPAAWAVWWVVVPPQPLPPEQLLEPVQRQSLAALCGTMNYLWAFLIGGAICAVGQLFIDLTKLTPARILTGYVVAGVVLSAVGLYAPLAEFAGAGASVPLLGFGHLLAKGVRTAVAEKGAIGILTGGLTAASAGITASLVCGVVCSLVGKSHDQNMTERRGDTLLFHTPPVIAAQAAVGGKKESEGPLAAGFDELTTDNRLGQCSWEAAEKQLQLRAARLCLQKASLPAERVDLALAGDLQAQCTASGYALRELGVPFAGLFGACSTMAEALALGAALCSSGAAQNLLAMTSSHFCAAERQFRTPLSYGAVRTPTAQWTATAAGCCLLRPAGQGVGVAAATLGRVQDYNIKDINNMGAAMAPAAAATLLHYLADTHAELRDFDCIYTGDLGLVGSQMLRELLAAEGLLLKNHADCGCLLYDAGEQRVKSGGSGAGCCAAVLCAHILPKLLRRGSRRVLFIATGALMSQTTFLQKESIPAVAHLVELTAPEKESMKMTAQEYARRVQKAGPHSPLLADCLWAFCVGGSICLLGEGLRQLFLRQGADAETAGTLTSCTLILLSAVLTTLGWYQKLAAKAGAGSLVPITGFANAVVSAAIEFKAEGRVPGTGAKMFLIAGPVIVYGTLAAVVYGAVLWLLGASILMRSSHHRNHRARRLLCLTALACFVVGGTAYACTRKAAVPQLPELPAESLAQPAENGAQQSVLTAAQAQALLDDPRMILVSRTHPITEDYPVETKECGSATAINKTLQTEAAEAFLSMQAAAAKDGVDVRMQSGYRSVSYQKKLYDNKTQYYRDKGLSEAAAREKAAAIVNPPGCSEHNCGLAADLNSPEHTTLDTGFADTAAFRWLCENAEQYGFILRYPKEAESVTGITYEPWHWRYVGAENAALLNRSGLCLEDAVAVLQRIAAGETVTGMINRTKLSVIAVSAVLAVALTGCGGSASSAPSSVSSASASAPVSDAASPAADTTENGTADLDSAVETLLAANPISNQFEIAAMNIEYDFGLKAEDVAAYKGVKSNDNGDAGLVLVVEAASGKAQDVVTALESYKQDQVAFYGNYAEFAQAQSNVENAIISSKGDRVVMVIASNECTADLNSAVDSALNSMVFSTIIFLFRFLPITLALYYLAPAKLKNTVLFLCSLVFYCWGEVRFFPVMVALILINYLSGLAIEHFDAKPALRRFFLLVALIGSLGMLFYFKYANFVLRSANALLGTAFAEIQGIGTLPLGISFYTFQTLSYSIDVYRRDVKAERNIIDFGAYVVMFPQLIAGPIVKYRDVSDQLHVYKHRYNLKQIEEGMTLFTFGLAKKVLLADAVGALWTDIIGVADSPSTTFVGLANASTPLVWLGIIAYSLQLYFDFSGYSLMGIGMGKMLGFDFPANFNYPYISASITEFWRRWHMTLSGWFREYVYIPLGGNRKGLKRQILNLFIVELLTGIWHGANWNFICWGLYYFVLLAAEKLFLLPYLKKGKVWPHFYTLFLVVVGWAMFVGNDTGVSFGLLFQKLFIPSGGVSPLYFLRNYGVLLAVSVVCCTPLIEKLWDVLRKNVVTRCAAILTLLVVSTAYVVGSTNSPFLYFNFMSKHEKKTSSLLHYPVLVVFSLFFIGLFALDMVTPDRSYSELENTTLSQRPALTQFTAKGLNSYFTAYTKYVKDQVAGRDQWISLQSVVETTLLQKQQNGGILLGKEHMMFPRTYGLLSSEERTLPKNTAALTSLCQRYPGKVNVLVAPAASDIYKENVPANAPLLDEDGYLDQLSAAVQAAGGSFVDVRPTLTAHKSEYIYYRTDHHWTSLGAYYAYSQLCQTLGLTPFDTAAHTALTADGFYGTHYAKARTWNAVPDVITYYDLANTLTVWNVTAAGQPAEGQTTGLYDTEKLSVYDKYAMFLHGNNGLSRVQGNGSGRILVIKDSYANCFVPYLTANYADIDVVDFRNYNYGLDKLIADNGYDQILVLYNFDSFKSDPYLYRAGVQGMKKMNYPADYAVLSNEEMTYTTGGGAVDDAASLATTAATVVGAVVLASSYIWGIKQARTWLQQDGNKDGNFFTVMGRATDALAADMGKSAGNFVRDAVSTTMVVALAPLSAILLVVRMEKMMMPAYYNVLSTEEMTYTEGGATATMSEALLCWLIPPYGWFKGVTAVRDYRRKNPNTWMEKGLDALATDMEKSTANTIRDLACAAWFVTSTASGVGLIINAAVILLMKKRFVAVLLTALFSVLLLTGCGGSDSFMTDAEFTRMINRELADSGNSIQLTYDSSLGAKAKTVFNVYIATNDVEAALKAAGLDDDHYYMIAADYPFESFSKSATYISSQVLYYLVNGQVGKRVGYATITFKNGNTQIIALVATYMDAKEYFQRDPEREAFYRTFYQICRRFNVTWSTATPEVRAFVEEEATRVAYEQEKAQATIRLMGEIAKGRRSGEERGCLTNEEMRAHFRARTSDEPLKEEPLPEEMAQEKRDYYEVLGVSKGASDAEIKKAYRKLAMKYHPDYNPGDKDAEAKFKEINEANEVLSDPKKRQLYDQYGFAGVDPTYAAQNGGGPGGFSGFGGDGVDLGDIFGDIFGGGFGGFGGSSRQANPNAPRKGQDIRVRITLSFDEAVHGCKKNITITRQQECTECHGSGCAAGTSPETCPDCGGRGFVIRQQRTPFGVMQTQQPCSRCGGKGKLVKNPCKVCHGSGKVATKKTLEVSIPMGIDDDQSFALRGMGDAGTNGGPAGDVIVMVSVRPSEVFQRDGYDVWVTVPITYSQAVLGDNVTVPSIDGKVEYTVPEGTQSGTTFRLRGKGIQYLNGRGRGDMYVKCEVEIPKKLNKAQRDALKKFEGTLKEENYEKRKGFFKKLKDMFNAMSKIIGIDLGTTNSCVAVMEGGEPVVIANSEGARTTPSVVGFTKTGDRLVGQVAKRQAITNPDNTVSSIKRQMGTDHKVTLNGKEYTPQQVSAMILQKLKADAEAYLGETVTEAVITVPAYFNDSQRQATKDAGTIAGLNVRRIINEPTAAALAYGVDKEDDQKIMVYDLGGGTFDVSIIEMGDGVTEVLATNGDTHLGGDDFDQRIIDWMADAFQTENGIDLRKDKMAAQRLKEAAEKAKIELSSAMSSQINLPFITADATGPKHLDMTLTRAKFNELTADLVDRTMTPVRKALQDAGLRASDLKKVLMVGGSTRIPAVYDAVKKELNCEPFKGINPDECVAVGAAIQGGVLNGEKKGLLLLDVTPLSLGIETLGGVCTKIIDRNTTIPTHKSQVFSTAADNQPSVEVNVLQGEREFARDNKSLGVFHLDGIAPAPRGVPQIEVTFDIDANGIVKVSAKDLGTGKEQNITITASTNMSKEDIDKAVKEAEQFAADDKKKREEVDIRNGADQMVFQTEKMLKENGDKLPADVKSDAEAKLADLKTAVQSGNVDDIKAKQEALSQVFEKMYQAAAAAQQAAGAQPGADAGATNEKPNDDGVVDADFKEVMSEEAKNTVPETEQPETAPEEKTAAAAPEQAAAEAATEEDKKKDGGWFNKKARELEAVKAKLDAAEKNAAQAKDQLLRMAAEYDNYRKRSTREADQKFGDGVSHAVEKIIPILDTLDMAANAPTTDENYKKGVVMTLDKAAKALDALHVEEIEVLGKPFDPNLMNAVQQIPAPDGQESGTVVTVFQKGYKLGDKIIRHATVVVAEMTMDARKQRVLQAIVALYGLEGEPVGSSVLANYFDMAVSSATLRNEMAALTKLGLLEQPHTSAGRVPSAKGYRYYLDNLLTDDQPLDRVTRARVDAVFASLDHEPEKLAQGAAKALAAISGCTAAVSTPCAEDLCIAHYEVVQVGRSAAAVLAVTTAGYVRTRVARVRTGLSRENAAALAALLNRNLTFVAPVDLSTRMLSELCGQIAPELVPVVSAAAAILQDSVKPHVFLGGEQYLLDWPQLDGRVGDILTLLNDEEQAASLIAPPENRSESVLLGEDLEPQIPGLCIVSDRYLVGGGLWGSIALIGPTRMPFQKLMPLLHEFADQLGEGMSGKRKDTPQAAVPRRTVIYKEDLEMGNLVFFASCLNIRKILQERRKSGRTATEKEKSPYWLQSCNSKGRGETVYMARNDGIDRTSVRNLAVSDKAVGNTQQHNEREKDSYRNPDIIPQRAAWNVHFKKPTASYTDLFAQLEAAGAISTRGLKPDATHYCELIFDVNSAYFDNHGGYEFAKQFYEDAYKAAVQIVGGEQYILSAVMHADEVNRAMTEALGREVYHYHLHVVYVPVVEKQILWSKRCKDKALVGTVKETVMQVSRSKKWASKPLLDDAGKPVLQKSGKPVLKKSYSVLQDDFFNYMRTAGYTDVERGERGSTEEHLTVTQFKVQREQERLDTLTAQADQQAQSLAKTSQTLSKKEKELAAVQKKATLTKEALIHARDLEYIGKRTFLGNYSLTEEEFSKFKKQADHGYMMDVENRRLKEELSTAKKEAVRWSNKYHDLWYDVKPYLDALHRAPELVRGFLEKILAPKQEHTMNVPQQNRKRGQDVELMLAISLRSAYNLCNSTTEFRVLRVGGNIRVPKDSFDAWLYRAAMAYITKRGNSYSVRYTYEDEHGKSCDKWESFPTKEEATNRKKQIEHELAAGTFLIPSSVTVAEFLMDWLPKQCSKHKWAPKTYESNLSTIQNLIIPYIGSMEMQKLKPYHMENLYTTLSKTPCGSYVEGKKQELTEKQKQRFLSGTTIHEVHRLLGTAFQYAVEWGILVKSPVPVDSPKKSTQERTIWTVEEMRAALDSMKDPILHLAVHLTLVGALREGEIVGLTPEDLDFDAADGIGTFRINKSMQRVRKEALNQVDDGCIIKVFPDKLERSTTSLILKSTKTASSCRTIFMTSALKEELKKWLNQLAADEMKDPARYHDSGMLFRLPNGLAIEPVLIRKKFLKWQDAHPEFPRIVFHGLRHSSATYQLMISGGDVKAVQGTTGHATADMLVNTYAHIQQSSRVELGRKFEEGFYAKQEGPSPQAVPAAGEPTISMTALLELLKNADPEVKAQLRLALLTMMKLLSCRFNMDTNRVEARFEDGTTLAIDCIAIEDEYGSTPAQRAELDWLLYNKPLEYAQLVLGGELEHYLSLGCDHGRLEDMHGFCTDFARFQNVQKVLFAAKSDKGCRNCRVKNYAALLKNNDDSKLPMPRQVTFYAKESRLCKPCAEKPLIRANVQTVCRKCAAAFLHKERTPNLSIMKQDLSKKQKKRLLSSTSIHEVHTLLKTAFSYAVEWDLIHKIPLPRDAPKVNIEERTIWDEKTMLAALQTIENPALHLAVHMSMILSLREGEILGLQPSDLDFDAADGRGTISVSKTMQRANKDALEKLDPNQVYHTFPDRREGSKSSLILKKPKTKKSNRVLYMTKPLKEELLAWLEKLKQDEQNAPEKYSNCGQLFRLPDGLPIAPELLTKWYRLWRAEHPEFEQIVFHGLRHSSATYQLLQSDGDFKSVQGNTGHATAAVLMDTYAHTQDKPRLELTEKIEANFYSQDLTPAAPQPWMASIMKRGDSYSVRYKYKDHSGKPCDGWESFKTKKEAQERKITVEKELLDGTFLVPDTMTVEEMLYKWIPIQSTKHKWSPKTYTQSVAMVQNLIVPYIGNGRCRNCEPTTLRSSIPPLPRPPAGSMCTVMNMNRPDMTEDVKFKDYTNKSLQKDSNTVTMKASKSPATESSDQTKAAKHEPLVYRVEEIAQLLAISPRAAYNLCNTTKDFRVLRIGTSIRVNKQSFDNWFAAVMPSDMMLCVISYWVLSGAKRRQIQQLRCCAFPAKLLKRRNVYLKLTRHNGRAGAHGTYNPKHNDRSFNLANSEHIDPERAKGNIYWDCFHGFRSALDPQDPDDLAATFSDVERQFYETHYTAFVESQNERNAKIRHTERNRSIPDLLSSRKTCPEETIYQLGTLDEHASAEDLLNIVTEFIEAFKTKFGEHVHVLDWALHLDESTPHIHERHVFDCENKYGEVAPQQEKALEALGFDLPNPGKPLSRRNNRKITFDAACRKMLFEIAKRHGLELEEEAEYGNRKYLEKQDFILAKQKERLAAQQNRLDELTLKVSDMETLLENVSAAAYDKAVEVVTDVVRTETRKEDMRMIEDTKKWVLSPERKAPKATREYAAHRLDTVLDKFLKTMQTTATRLQEKLLKPDVRQKGKEQVKEKARDSVLQLLSRLQAEQTNKPTAQPRTQEGHSEIMYMTNEEWEQNNQDYLKESYEETGFTTGGYAVRKLICGGCGRVFYTTIYTKKYCHSYWCGNQANNRRQREYRQMRRQDLVCQCCGEKFTPKREGAHYCSNACRQKDYRKRVTDAASAQNEHLDKCNASAKMMETLVKREGWIARSVCNGMQTRNFSEQKNNRLLQVELENGRSFLQNDCQIWEAFMVETHTRILGIAPYDGMRTAMEQAAQAYPNVELEVYTGDLEEGQAIVQRMAPNSYDCIISRGGTATLIRQVTDLPVVDIHISVYDVLRTMKLAENYTSLYAIVGFPSITEPAHTLCSLLNFDLDILTVRSAEEVRHTLERLKQGGYRMVVCDMVTHTIAREMGFDAFLITSGIESLHSAIDQAVNISTWFGQLRQENLFLRSITQEQGGRVVVMEPDGSLYYHNMKDISPELHRCLQTHLREIPATGSLKFYYTERSQLYSITAQVLLMNNVQRYLFYCVPSRIPLHSNRPGLRSLNKGECEYLFSNSFYSLSGAMGTQDAEINALAAVRQPLFICGEPGTGKEQIARYLYLHSALVNRPLVVANCALMNDKSWDFLLNHYNSPLNANGNTVYFQNFEAIPEQWSAELLAAIEETGLARRVRLLFSRSVRPEEPVSPVTRRFIERLGALTLELPPLRSRSDEIPSLSSLYLNSLNLELGKQISGFEPRAIEMLRQYPWPNNYTQFKNLLRSLATLTNGPYIRSSSVADLLSKERSLRSAPAAHPAAVVSTDTSRTLESIIGEVVQQTVAAHGGNRAAAARQLGISRTTLWRYLGKIEAGEPTDPTMLRLLMIADDFTGALDTGVQLAAHGIPTQVVVGQADLSACSSTVLVVDTETRHLSAAKAAEAVARLTRSAVENGVGCIYKKTDSALRGNIGAELAALLKASGARNLPFLPAFPQIGRTTKKGVHYIDGVPVNESPFGIDPFEPVRCAEVTKLIHLQTEIPAQNLCPGETAADKTGILVYDAATAADLETAGRQLFQNGTPPVLAGCAGFAAFLPELLGLSDGSVVETPQLDPRLLVLCGSVNPITLRQMDTAEKAGFARLRLTPRQKLEPGYWASADGKAALAEIEQMLAANPRCIIETNDAGGNQLTADYAAARGIDLDGMRVGISGSVGQMFGALFGSEHLGTLLLTGGDTLLQCMNSVGARELEPVCELESGIVLARFTYQGRTRYVITKSGGFGQEDLLVELADRIAKHMTYAKLPGLTWDGTVYENEEMGTLEALLPTGGWPTAHAPAMVELPNGDLLCCWFAGTYEGSADVHIICSVLPHDGTKWLEPVNISGDPTRSEQNPSLFYGPDNAVWAMYTAQLDRVEGKDNMQFTAVVRCQKSTDGGKTWGDYTTVFPEEGTFCRQPIQVLSNGRWIFANWLCTDSAEGLSGDPTAFRISDDEGKTWRMVMMPGSNGHVHANVIELEPGHLVAFMRNREAYRIHRSESFDWGETWTVPAPTPLPNNNSSISAVKLQSGRIAIAYNPTCTPNPVPGKAAWPGLRCPVAVALSEDGGLTFPIIRWMERGEGYMGDENKTNNKQYEYPYLMQGRDGMLHLAYAARTRQGIKYVRFSEQDVLGAKRETVGLYNPTAAQSRMLTQYNLKMPHAVYGGENAMDNITAIIKARGAKKVAMFTDKGIEGAGLFALPEEAVKASGAEYYVLDELPPEPSYMAVQKLVDEFKVSGADLIVACGGGSVMDAAKLASVLVTDAYGVKELLDNPGMAQKCVPIVLIPTTAGTGAEVTPNAIVAVPEKELKVGIVNENMIADYVILDARMIKNLPRKIAAATGVDALAHCIECFTSNKANPFSDLYALEGLDLILNNIEKACDDPEAMAEKNRMQIAAYYGGLAITASGTTAVHALSYPLGGKYHIAHGVSNAILLAPVMRFNSEHPAVRERLAAAYDRCCHEEKTCTTVEEKTAWMIARLEHIVKHLDIPTSLKEFGVPAEDLEGLVNAGMQVQRLLVNNMRPVTADDARKLYQEIMMKTSDIKGIIPPVITPMNNDPEQTVNHQALREQVERLLAGGVHGIFPMGTNGEAYALSFQEKEEILATVIDQVKGRVPVYAGTGCITTAETIRLSKRAEELGADALSIITPSFALASQKELYDHYTAVAKAVNLPIILYNIPARTGNKLLPETVQALCRDVENIVGAKDSSGDIENLKAYIRLTRELDKEVAILAGNDGAILTCLKEGGAGGIAGRANIWPETVAKIYDCFKAGDLEGAQAAQDAIAILQQTFKYGNPNTIIKTAVALQGHPVGKCRAPFNYVPEEGMEAIKKVLAENEAKGLHMNKPIVGITMGDPAGSGPEITIKALADPEQYSYCRPIVVGDVKVMEQAKKFVGREDIVIHRCEKVSDALFTPGTIDVLHLDLIEDISKFEIAKVSVEGGNAAFQCVKKVIELAMAGEVDATCTNALNKEAMNKALEYYHGEKSDGYTHFDGHTEIYATYTHTKKYTMMLAHHDLRVVHVSTHVSLREACDRVKKDRVLEVIEIANKACKDMGIENPRIAVAGLNPHCGENGLFGREEIEEITPAIEAAKAEGITGVVGPCPPDSVFSQALGGWYDIVVCMYHDQGHIPLKTVGFVYDREKQEWKAVEGVNVTLGLPIIRASVDHGTDFYHAGKGNGNELSLVNAIKYAVKMTGRANMTLPMIIALAVTVLMIILIMVDKLPFGAPPLLALLLLVVFGVTDIKTAFGGFANPTIVMLASFMAIIAALQKTSFIVKFKQTMFNMASKGGFKAYVLLILIVMLGCSLFGTGSTAYYVLVIGLLSTLPYSKQLPPSRVLMPAGFAANHPLLPFNTALQYGIVIAVLESAGVAANVNLVKFSLVNLCLSIGFLVWCVLAYKILPDHPIAEAKEEALHAGEQKVALTKNQELITYFSFVLAVVGMILQSKIGDAGYAITGLAVGIILISGVMDFNEIRNSISAPIILMSAGVIGIADALGNTGLTSLVGETVAKMLGTNVNPFVLIFAFCILTSVLATLTGSTIGTVYVFAPMAIATCVNLGLDPTAAAAAIVVSGWCGHFLPIDGMPAMIMGAGDYKITEFWKFTIPQYFIRLLALTVGAVLIFPMKMKNTFELEHVGINTDNAGEAEQLALLLCKLFNLEPRHGQKSEFAGNYFECMKSPFLGKNGHIAMRTPDLKAAMEELEENGFRFRMETAAYFEDGRIKNVYLEGEYGGFAIHIMQKMLVPVLLFIVGLLFLIKGGDWFVDGASALARRFHLPELLIGATVVSIGTTLPEVMVSTMSAVSGHGEIAYGNAIGSVICNSALIAAITIAVRPGKVDPKTLRVPVAFFFAAAAIYCVAAYAMGEFTRPLGFVMLAMFVAYMVANVLQMKKAPAAAEAEAEAENAGEEMSLTKTLVLLVLGAVLIALGANLLVDNGTLIAQALGVPESVIALTFVALGTSLPELVTAITSLVKGCSDLSLGNIVGANVFNLVLVSGMSVTLAPFTVPQSSTLFGINSSLVLEIPVMLAVMMIMTLPALKRGKLSRAQGIILLCIYAAFCAIQFTMMTRTRPAKKLQPGQIPQAYNPIGEYQRSFTMPENWASCYLRLNGATMTDLRDWLKAHNIVTLYKTQNRLTKKLLHFSDMFYASIVFEIFAHKYDFFVQLVQSILKYNRGIYMQNVLLRLREVQPSLSSTERQIAQFILENPDETTTLTIRDLARRSFSSPSSVVRICRVIGFQGYKELRHALTLELATLGENGSHREKDITPQDSLQEIVDKVTHKNIQSLLDTQRLLLLDELEQCVELIANARTVLLFGIGSSLCVAKDTYLKFLRLDKPCVVNEDSHSQLLQARNATAQDVGIVFSYSGQTMEMIQCIKEMKAGGAPVIAVTRYYPSEVAQLADHVLYVAANESLFRNGAMSSRLSQLNVMDILYTAYASRNHEDTMRRLAKTHIYKPGDPEVLTQPMGLNLSGMTTETRNPRTMQLDQMSPLEIVTVMNEEDARVPLAIAKCLPQIAQAVTWAAESFEKGGRLFYMGAGTSGRLGVLDAAECPPTFGVPKEMVVGLIAGGEKAFIEAVEGAEDSRELAVEDLKAHGLTANDFVVGIAASGRTPYVLGGLDYAKSVGCHTAAIACNIGSAIGKAAELAIEVNCGPEVLTGSTRLKSGTAQKLILNMISTGSMVRTGKAYQNLMVDVQQTNEKLHTRAENIVIDATGVEREKARAAIDAAGGSVKTAITMLLADCDAAEAARRLEKARGHVREAIRLEVLMTNEELVRAALEKVGGKSNVLTATNCMTRLRVRVKDDAKIDDEGLKAIEGVMGIVHDRTGYVEIVVGPGKCRKCADICRDMGIPADAAASTANDWQTNKAAVKAGQKQSKVKELFKTFGDIFIPLIPGVVASGLCAGINSLIGQVVPNYADIPALALISTLLGLMNTCFLGYLTAWVGYRAAEKFGGTPILGGMLGMITGLDGINKISSILGLFNEAVPLDSILRAGRGGVLAVVLGAWCLVKIERWVRKWMPESLDIVFTPLITMILCLVPYILIIMPATGYVSTALCWVVEKLCMSDILIVRIIAGYISTALFLPMVAMGMHHGLVALYSVQLESFGYVTLYPALAMAGAGQVGAAVAIYFKAKKCGNTRLKNVITGALPAGLLGIGEPLIYGVTLPMGKPFISAGLGAGFGGAFVMAMQVAATAWGPSGLLALFVMTAGPHGVAASVGCYAVGLVICYIMGFIVTNAMVSVEDVANAMLKTLGRSVYLTQFEEQRASLSAFAAGGAPVFISLHISEEFDAAYCARVQEMCDFLSAQGWRILADVSEKTIRQFGCADLTALAKRLHLWGLRLDYGFSLEEMCALAQQLPVAVNASTTTPEVARQLAAGGGTVIAMHNFYPRPETGLDPEFLRESTAALQAEGLQVYGFIPGDALLRGPLYAGLPTLEAHRTAAPSAAFADLALNYGLDGIFAGDPEVSTREQEYIRHFCTTGELCLPVAMRPGYETLYDRTFTCRPDSPKGLVRYQESRLYSCFGSTVQPDNCVERRRRCVTMDNIGYGRYSGEIQLVRADLPADEKVNVIGEVPAEYDLLLDCIKRGKTFRMVKVSMTQTRPLKTNLFNRNADLLHGPIFKNLFLFMLPILVSNLFQQLYNTVDTMIVGNVLGDTALAAIGSCGSIYELLVGFGIGIGNGLSIVAARSYGAQDEDLLKRTVAGALVIGLCASFVITTAGFFGLRPLLQLLDTPAEILEDAYRYIIVIDLGVLVMFFYNLCAGLLRAIGNSVMPLVFLLISSGLNVALDLWFIAGLGMGVQGAAVATVIAQGISVVLCILYVMRRVPLLLPARKHWAVGQHLYWELFSQSISIGLMSSIVSAGSVVLQYGINGLGTLTIAGHTAARKLFSFTSMPLISMANAGSTFVSQNRGAAQPERVRKGMRTMYLCSVVIMAAEVVLMQLFARQLVQLISGSSAPLVLENGARYLMWNAPFYAVLGVLLCTRYALQSLGQKVLPLFSSVIELVGKVVFVLVFIPRYAYNAVILCEPIIWCFMAAYLVAVYRRDAFVYPRKKTIMADYRKSSVHCHSTLCDGKNTLQEMAGAACAQGLTTLGFSGHSYTTPDREYCMTPGRTAQYRATIAKLKNEYRGKVDILCGIEWDLLSEGTPKGFDYWIGSAHHLYGKNTGKYYEIDFRPEDLRDCINNDFDGDPLAAVEAYFAEVEKIAAKKPDILGHIDLVKKLNADGSFFDEESPRYKAAALRALQAARENDCILEVNTGGVYRGYRKDFYPGAWLLGEWNKLGGRVIITADAHDTAALTFGFDEAAAAIKAAGFTALTVLTVNGFEQQELMELKFDEKGLIPAIVQDHYTKQVLTLAYMNAETLALTIAEGRTVFWSRSRQEIWRKGETSGNVQRVVSITADCDADALVVEVVKDGPACHTGAESCFFNEVYVSPELKQFSWQGLYNLIKGRKDTPTEGSYTTYLFEKGKEKILKKVGEECTEVIIAGEKEDKAETVYEISDLAYHVLVLMVSAGITVEDVTRELEKRHVIDHKVKQERMQMITKRIIPCLDVRDGRVVKGTNFEGIKDVADPVEMARLYNAAGADELVFYDITASFEGRALFTDILTRVAGEIFIPLTVGGGINTLEDFDRVLKCGADKVSVNSGALKDPGLIPAAAQRYGDQCVVLSADVKRVNGQFRVFAKGGREDTGRDALDWISWCAAHGAGEICLNSIDTDGVRNGFDLEMLDAVAARVNIPIIASGGAGKKEDFLELFHHKGIDAGLAAGIFHQKLLGIRELKEYLNASGVEMRLMQLFPAIDLRGGQVVRLTQGDYDRMTVYGQDPCAQARSFVAAGAKNLHVVDLDGAKDGTLSNYDTIAALAKQGGLYIEVGGGIRTEERIEKYLSLGVGRCILGSVAVTDFAFTARMLQKYGDKIAVGVDAKDGYVAIHGWKEVSAEPGVAFCKRLAEAGCTAIIYTDIACDGAMQGTNLSLYRQLAAEVPGVAFTASGGISSEAELLELQQMGTAAAILGKSLYTGALDLARCVQLVQDMKHLHSFARRAAAFLLAAVLCVCIPAAAASAATTIGGADTTLIPAEDENCLSWLFGSKDKITMPYLNIKGQGLKRNVTLDLEDCLVGITYTELGSIGSFVSASAAQQAWKAQAVAVHSYLEYHKQYGSSTNALIYTPVDQIPASARNAIRKAVQAVKDEVLVYNGSVCDAVWSASAGYNTQTGVYGTCASLDAWGTDVPYLQSVESPYEEQYHKLLRRVIGKDYTYIEYNDSRTGEPYQSADTTHKDLGGFVQYNTLVSNGRSYRYINQFVSSRYCFDFGTDASGTPCMTYYGYGHGVGMSQCGAVGYAAEEGMNYKQILQHYYTGAKIRTSTTRSGGLFGWLAGLFRMELDQEKQNQEAAERCRALAQRIVRELAPRSVQVLEDSGLLEKAFCKMNTAVVQSAPELLVVADPQWVTLPAVQAEKVVLVCAEYAGMADCAKQLAAQGFCRELAWKDRGKEQLTALFCRMAAPELPELEDGYEQQLDVLRERTLLAERTAAEQTAQLERLRSDLSLSRSHEQELEKTLNSVVNSTFWKASWPLRYLVSKCRQLWRTFPLFVFFATLRRVGFAGVMAQAKAKKEYKKLFPGKAMPADRFADVELLVKQAADQPAAPCISIVVPLYNTPHDFLVELLDSVQNQTYRNWELCMVDAGQDADVGALVQERARTDSRIRYRKLDSNEGIAGNTNQGFALATGDYIALLDHDDILHPCALWYVAEAIAKQGADFVYTDEVTFEGDIDHLTVYHFKPDYMLDNLRSNNYICHLSVFSAALLAKVGGNERAEFNGSQDYDLYLRLTEQAEKIVHIPHLLYYWRSSPASVASNISAKTYCLEAAMKALRAHYDRMGVPVDAVTMVPNTPGFYKTDYTITKPGRVSVLIPSCDHSGDLRVCVESIYRKTTYPDFEVIIIENNSKEPATFRCYEQLQKEHPDTLHVLTWQGTGFNYSALNNFGARAATGEYLLLLNNDTEVISPRWMEEMVMYAQQDRVGCVGAKLLYPDNTIQHAGIGFGFLTLAAHMHKNFPVGHPGYMGRLVYTQDVYAVTAACLMVRKDVYEQVNGLDESFAVAFNDVDFCVRVREAGYTNVFTPFAQLYHYESKSRGLDESPAKRKRFASEVERFQKRWAKQLAAGDPCMNPNFDLMKEDFSFDIKPLEMELSACIVVYNGAGEAIRAAQTVLDCTRRYPLTLYLVDNASPDGSGGQLTAAAKDGTLRTAPGQTVQVLCRLENGGFGTGHNTVLSLLHSRVHFILNPDIQLTADTLSDLADWMAAHPGVVMTRPGLTFPDGRPQQLPLRRCNVRAMVYRQLPCLRFWAKCNDRYLMADKDLTKPTEIEFCTGSFSAVDTAAFKAVGGFDEGYFMYVEDADLTQKMRTRGKAYLVPQYTAIHAWHRAAHRSLKPFLWQLRSLLRYFSKWGFAWMRGERGRKNSVFDSQKAVCRRHTAFCCFHLLHFAYFHSKIKCTAIVFCKNAAMADPKLFTADAAPLMKGIILAGGAGTRLYPLTMVTSKQLLPVYDKPMIYYPLSTLMLAGIQDILIISTPTDTPRFEALLGDGSQYGIHLQYKVQPSPDGLAQAFILGEEFIGDDCCAMILGDNIFYGNGFSKLLKSAVANAENKGRCTVFGYYVQDPERFGIVEFDKDGKVLSVEEKPQHPKSNYAITGLYFYNKEVVQMAKQVKPSARGELEITTLNDMYLKQDELDVQLLGRGFAWLDTGTMESLVEAADFVHMIEKRQGIKISAPEEIAFKYGWIDRDTLLESAERYGKSPYGQHLKNVADGKLRYMKIIVTGCKGQLGTELLKQLQEGRSELGPIPEKLLNATVIPVDLPELDISNYRMVDEFVRRNRPDIIINCAAYTNVDGCEVHHDDAFKANALGPRNLAQAAEKTGARLVHVSTDYVFSGRENGGIPQDEATLPGPISAYGSTKLMGEKYVERFCHRHFIVRTAWLYSYYGKNFVKTIVNAGKKFGKLEVVNDQCGNPTNAADLAHEILQLCVTHEYGLYHCTGEGICSWYDFAAEIIRLSGVDATVAPCTSEEYKAKHPDSADRPKWSALDNRMLRCTVGNDVRDWKDALACFFAHWDGENGMKGMFDAIFGRSVKILKILAKVQCVLAFVLASMLCGAVHEMLKPISQFSAIVLGLVVAVVFWVLQMFLAWALYAFAELVEYTKETHKELSNMSEGLARYTQATYEELHSMNKGLEAYTKAMGKTLNSMNKNLYLVAKHCCAEEERARAAARPQSGNNNKMKTYLITGCAGFIGSNFVHYMLKKYPEILLVNLDKLTYAGNLENLKDVEGDPRHVFVQGDICDKELVESLFAKYDFDYVINFAAESHVDRSIKNPEIFVQSNVMGTVNLLQRAKEAWYDADAKTWKEGKKYLQVSTDEVYGALGADGFFMETTPLCPHSPYSSSKASADMFVMAFHDTYGMPVNITRCSNNYGPYQFPEKLIPLMINNVKHHKQLPVYGDGMQIRDWLYVEDHCKAIDMVANGGKIGEVYNVGGHNERPNIFIVKTIINQLHDRLQDEGISEDLIKHVADRLGHDRRYGIDPTKIKNDLGWYPETPFEKGIVLTIDWYLNHQEWMDHVTSGDYQNYYQDMYKNKMPTPITASTLSALLSAALAQKPTRPLVLALDGRCGSGKTTLANALAAQLPGCTLLRTDDFYLPPARRSPDWAHTPCANMDLTRLRDEALRPAYAGQPVAYRAYSCREGAYLPPAQLPAQPLVILEGSYSHHPLLRPYETLRVFVTCTKAEQTRRLQAREGARYADFAARWVPLEEGYFAQYGVAENADFVVETTQGGTIMERDFETVMIEQCAPVLAGLKPAGLFRYETRNRADLARRVAGWNAQLNPKGLQVRVLRGCIATRQYLVYVYRAAKLQTVLADAAVRGFLAREGYRLPEDAADCNALLDQLSLRLCCAAEAADFPHEIGVFLGYPLEDVVGFIRHRGKCFTCCGCWKSYGDPAAAQQHFDQLAKCTAVYLRLFHSGTPILKLAVAAMNALRVALRINSGKIIFISQFWKICGFSRIAFSREESFSVTLPYKMAKRTPENVNIGMTKAGETVTIRRISGKDEVRLHLAELGFVVGSEVTVVNEIAGNLIVQVKQSRLALDKTMASRIMVDMKTLKDVKVGETATVARLHGEGPVKRRIMDMGITKGVQIYVRKVAPLGDPMELTVRNYELSVRKADAEMIEVVMSIKIALAGNPNCGKTTLFNNLTGSNQYVGNWPGVTVEKKEGKLKGDKDVVIQDLPGIYSLSPYTLEEVVSRTYLVKEKPDAILNIIDGTNIERNLYLTTQLIELGIPVVMAVNMIDLVRKNGDTIDLKKLSAELGCQAVEISALKGEGTEAAAKAAVAAAKAGKTGELPHVFTGSVEHAIAHIEESIQGKVDDRFLRWYAVKLFERDDKVQDELKLDKTLMDHIDEHIQDCEKEMDDDAESIITNQRYAYINTVVGKAVKKKARVEHLTISDKVDRIVTNRVLALPIFALVMILMYSLSMGTSIADGGWSIGTFATDWTNDVLFGEIVPNALGGFLESIGVAGWLYGLIMDGIVAGVGAVLGFVPQMLVLFFLLSILEDVGYMSRVAFIMDRIFRKFGLSGKSFIPVLVGTGCGVPGVMASRTIENERDRRMTIMTTCFIPCGAKMPIIGLIAGALFGGSPLVAVSAYFIGMAAIICSGIILKKTKAFAGDPAPFVMELPAYHVPAWGNVFRATWERGWSFIKRAGSVILLATVVLWFLQGFGFENGAFGMVEDQDNSVLAAIATKIAWIFAPLGFGNWKATVASVSGLIAKENVVGTFGVLYHFGGELSENGDEIWAAVAQDYTALSAYAFMIFNLLCAPCFAAMGAIKREMNNGKWTAFAIGYMCALAYCAALVVYQLGGLITGEVHFGLFTVVAVVVLAAFIYLMVRPNKYADNNEVKLDTSRIMMEFIATNFNLPTIIVAALVFGALGWVVWHTHKHGGGCSCGGDCSHCKGCHMQLTAAHLRYLLAIYEVSRTHLDISSRSIAEKLGVTKPSVVRILNLLMEQGMIVKEYYGKIYLTDRGIWVAKRVQQELDAILAHFPPVSGELTDEEQWNAALAMTSALPQRLFTADYERMVEEEEGGCAAGGTIMDANKYRTAYDKAQAVQHEVWTELCQHLEHAPDAQLLSDYTATLVYTLDKDRREEALRLLRGQLYSRQLRDTGRVESWFTDCGARMGQDIEGFVANARQQYVQAGLAEEQRAEAEAKQKAGRGRFRIRPASAFAPERAAYLVQPYLPRGMVSILGGVSAAGKTSLALDVCARLTRGAAFAPDTPPQPPATVLYLTAENDPNKVLRPRAEAMGADLDRLYFQDGASYSMGDEELAALCRVYRPALLVFDPIQSYLGQGVQMNRAEQVRPLLDHLGALAKELDMAVLLISHMSKPGPGVCSALDRLLGSSDFRNAARSILIAGRDPEHPEVRVVAHAKNSLGQPGESQRYRICPQGTVAYDGPCTLTADAIIREAGTPATGNGRPSAALANAIEALEKQLSFVGWVEAGEVYRLCAERDISDSTIRRARIALDLKVLRIGKQPDQKTYWYRSELEEAAVCADILNMNHQLKLSCMKHPRFTAWLCSAAALMLLAVPAFAQQPDALPPEQTAPAAQEQTAEAAAPDAEVPTEEAAQPAAEAPAADPQRTYVALGDSIVSGVGLPDFKYTAAAIGIDAAPNFEGYPEQCYVSLVGKGLGLDRQHAINLGLPGLTTGDLADMLHTGAMPQMNQQAGTYYVYPQMLDYLKRADVISVQIGSNDALVPALVALGNATNWKSEQLVATMVSGVLREPSFENLQRLNSDLSRLRLTKEEKQATTQLLLGGGTDAICEQAYQEAAVHMPQVVAELRALNPDAQIILLGYTNPVPLLPEWTQLFRRLNALSKNLAAQNENVTYVPIPFAMTATDAHPTVSGHKYIANRILRAIKKMMEDGKEPVYASKAKPWLKYYDEKYIHQSVPECSAFALVCRNNERHLGDTALEYYGRKFSYADLIVQIKKTAAALQALGVKKGDIITVVSVMTPEVVYTFYAADLLGATLNLVDPRYSAEGIREYIQEVESRLLICLNVVYPRCHQAAKRTSVERVVVLSPADSLPLAKAVGYKLTEPDKNRYASNVLRWKAFIAAGKGHSPAATPYDPQHTCVVVHTGGTTGSPKGVMLTDYCFNALAQEFAAQSRLFHRGQKLLNVMPPFIAYGYSCGIHMPLVMGLHIIIIPNLDPEKLGALVWKYKPAHMFGVPTHYQQLAADPLLKNKDLSFIRNYAAGGDSLSLGAEQTVNRFLKAHGVEYPLAKGYGMTEVSSAATIAAGNVTKPGSVGIPMVNTVVSIFEPGTETELPIGQRGEICICTPTAMKGYYNKPEETAYLLRRHADGQLWAHTGDIGSMDEDGFVYLDARIKRIIIRHDGFKVFPSMIENVISRHPAVHQCCVVGYADTDHTQGRLPFVFVVLEPAATGKKRQILRELRQLCLEELPEYVQPAASAYKIIPEMPLTPAGKADYRKLEEEVGMGFFTRTAMDALMKTSHPEINRRQCWNLHPHRKPCTTCKDICPYGEEIFTRPNLVKDWDPCTDCGLCVSACRSGCIAPSPEQVQRDTAAADTDNDTIWIGCEKSTRKNTVVRSCICALSWEALAYLALNKKIVLDLTPCGQCENDLCAEQLRKELTRLVDFFGQPMFEARFSLAYEEKEYPYHVQELTRREMLEQVSHGSKSGTKKLLQMLPGLRSEEDSGVDFRLLLHQRTKQLKAAMETPLQYGYYMPKFTDNCFGCGRCEKACRANALKFEEMPNGQTRMVLTPWKCSECGVCMNVCSNKGFDGMKLYQLTTLGPVVLHKCTKTLCKQCGKPIAPDSAEGLCSVCRIKARTLKRQEEARQRAEQLKAERAAKAAEEAAKAAENAAEATAETVEAAAQTAETAAALPETIPAGQSAAPANVTAPALGEPVSEMEQTANTMPAATLGQYKGLAFTRRVRPVSDKAVEADIGNLARVHAPFVPTDAPAARGMRITLDFEGFLEGAPIPDSRMEAVTVVLGTGQLMPAAEEAVYGHCAGETFRFDFTYPADFRVPELSGRTAQFEICLHTVERKQVPPVDDALAKSLGFADLDTLRESLREKKRLSHEANADRIAGAALLDMAGANLTVELPAELLAQNAEYQMTQLRQRLRKSKMTMELYCKSAGLTPEQVREGYRREAERQLRAMLAVRAIAEAEKITVTQQEVDAEIARLSKLHDTPEEEIRKVLSRDAIAAAVTNQKVQRFLLDHAALTSVVEKEMSEPITKPRVSAAAKTALVLAAAAVLLAVFALAAPGSKFFFPLVSLWCNLALFACVLLVLRVAGIKFDLFHKAVLIGLWAAALVYFFWALGRRSFVYIWDYVNYINKQYWAEAAFLQGPAAGFQFIFGSFAEDYTNFITLFLEFPFCLSDRTGDSFAFCQVFSILPMLLVLLAGLTIKVGQMLRVKNRFWYFLIGMTWMVTYPWLRMSAMLSQPDWFGLIFGFSILLLTLDFRFEKLEPVRFCLLFAATAAIILSRRWYLYFVVGYYFAYAVLVLVSSARTARAGQKKQALLQVRNLVLFGLMSMVAMLILLWPMVSRILAYSYAERYSYYNGGGFAAEISLQFWRMGLMNLVLVGMGLWFSLKKRKMPALPCLAGLEILLSMLLFTRIQNTGSHQMLLFLPGWFLLFLLGAAALAEGISRFRAAKVVFWVFTLVFATSVRCSPLTTIALPGFLVDHFPLAVTEEFVRLDKLIYDRKDLPQIKAIANWIDTHCAEGEISYMIPHDMLYCPDHFKNCQLPATPINDKLAFGFSVPGTHNFPMQFFEAKYVLTADPFPQTFVGNGEMSHKLNERFLAVRDEYFALEATFDMGNGTTFTIWRRTVAPTRAEVEYYLSAFKEEDAQYPEMFSQIAESWLAARGLMQNFTPYSITTPHGTVQHPGGEKCRMSRRFQSRRDIFAMNYPVIPRTFFSGDCFDAYRILGAHPCTDPNGAEGWRFAVWAPGATAVEVCGGFDGWERGVPMEKADTGVWSAFIPGLAEGDLYKYRVHGADGSTVMRSDPYAFATELRPGTASKLTKLDFTFDDTAWMERRDKCRNRPLNIYELHAGSWKHKPGATQPDGSDGWYNYEELARELIPWLLEHHFTHVELLPLAEHPFDGSWGYQTTGYFSVTSRYGTPAQFAGFVNACHRMGIGVIMDFVPVHFAANADALAKFDGTYLYEYDSDVGQSEWGTCNFNYYRREVCSFLSSAAGLWMDVYHCDGIRMDAISRALYWQGDPNRGVNQGAVNFLRSLNHGLNERWPTGIYMAEDSTNFLKVTAPTRYEGVGFDYKWDMGWMHDTLDYFATPFGERPGCYGKLLFSMHYFYNELYLLALSHDEVVHGKKTIIDKLWGSYAEKCAQLRTLYFYMYTHPGKKLNFMGNELAHFREWDEKRELDWNLLEYPFHDAFQKYFAALSRIYASEPALYDGEYNPDCFEWVANESCAEGVYAWLRKGRGQNLLCVMNTQDHAHKKFPLYLKFPCSAELVLDTEAGTWGGVHKAHRKQSFHTTDGGVFGRDYTLTLDLPAMGSYLLRLAPEAPNPDAARLSANRALAQKRKAAKAAKAAAEVSDKMAWYDEAVFYHIYPLGLCGCAHENDGQPTPGAFAKLEAWAAHAAKLGCTAIYIGPLFESGSHGYDTIDYRLVDRRLGTNEEFKAFVAACHARGQRVIVDGVFNHVGRDFFAFQDLKANRENARYKDWFCDVNFWGNNEYNDGFSYGNWGGYNLLVKLNQRNPEVQQYHYDTVRFWVEQFDIDGIRLDAADVLDFDFMRGLRRLANEVKPEFWLMGEVIHGDYSRWANPEMLHSVTNYELHKGLWSGHNDHNYFEIAHTMRRLQGLCHDTRLYLFSDNHDVERLPNKLRNREHIRHIAILVYSLWGIPSIYYGSEFGIEGKKEWGSDWPLRPCLELSDYADAERTNPVTSVYKALGKCKAELPEMTYGEVKELQLTTQCYAFARVLDGKAVVAVLNNGDTPAQLEFQLPVETAKVTDLLADTVGAQEVLVSTEWDRMKVQLPSNYATLLRLEMNAAQRRERILTRLNSAGAPLSASTLAAELGVSRQIVVGDVALLRAGGAQIDATPRGYQLHPAEKGYTGILACVHRTQEEMRRELYTVVDQGGTVVDVAVENSLYGEIRATLNLCNRYDVDNFIRQAADAPESLLSRMTGGVHLHTLRCPDKDTFARIRTALEQQGLLYRKEMGFLDIRIEKTERAIKQAFMELRREKPVEKIRVKELCDRACINKSTFYAHYQDIYALANAMEDEMVHAVVESLPRLTASDVSERTEWLAREMFRAFTAHQAEISVLFSGSRQGLFINRVEQAMCQCIAQTDPTFETDVVRKVVLSFCVQGCYYTFTTYCGQMDEKRLVTLLASIARAAQRIRMMESGYLPVTTAANDMDAIRASGLELTDDYFEAWYQATLAQLQQYEGMFDAWKQRQRQRLENRPERTVFYNIFATMMLVLAVELLMAAASILAVNVTGQLDENAKDLLTMRVRNRASYVQEILRNAEDLEQLSEQITATTQQLLKSGDISLDTLDNSSEQSDALLVALAPQLLDTLRTKQVTGIFLMLNTHDLDTCEVGKKMPGIYLRDLDPDARPSERNSDLLLERASATVVKELAIGTDKGWQPAFPYQGDTKGGILRTVFQTAYKSGAGLSAESYGRWTTNSYCLAGDDRHAIAYSMPLILPDGTVYGVVGVELLTDYLQTKLPFTELDEDKAGTYFIVTTTDDALTDGVLSLRKTVTSGEDLVTADAPLGVLNCRSNGNGGNWVELNDKRYYMVLEPLQVYNRNAPFAAEKWFLAGTMEQSVLLAFSSRVREVLLATILLTLVLSVLGSLLVSARLARPINRLYREVIDAQEKKTFPRLTRTAIREVDRFAETITELNKELVTNSTKFLRIMDMASVEIGGYELRTDTGSVFVTDNFFSLLGKPEMQGKPLSVRRFEEVLKGIREKNPCDHTAEGDELLTIQQPDGVRYIMLRSTIEGHAKIGLAEDVTAAVLERKRIEHERDHDILTGLYNRQAFNRVCTELFAAPERMGVAALMMMDLDNLKHINDTYGHDWGDQYIRRTGQCLRDNTPAGTVCARLSGDEFLVLFHGYRSRDAVREKIDRLTKAMQQSVALLPSGNALHISLSGGIAWYPDDGQDWETLKKYADFAMYQVKHSEKGRVEEFDIGVYNREAYAERTRREFRQLLSNAQVFYCFQPIFSARSGRVVAYEALMRSDLPTLRSPATIMKLAREQGALYEIERLTFTKALETFDSLCRAGSVSEEAMLFVNSIANTCLSHEDGKYINSHWHELCRRMVVEITEEEEIDYEALERKRNAPGFSGMFALDDYGSGYSNENTLLQLAPRFVKVDITIIRGIDTSPDKQQILRNMVAYAHPRSMKIVAEGVETAAELRTVIELGADLLQGYFLARPAIVPGAIAPEAAGIIQELQRRKKDMVQVDLITGFLGAGKTTFLRRYVRYLVQQGHKVCILENDFGAVNVDAMLVQEVLGPGCDVETISGGCDCDTHQRRMRTKLIAMAMRGFDRVVVEPSGIFDVDEFFDILRDDPLDRWYQLGSVIAIVDALLPETLSPQAEYLLASETMNAGCVLLSRAQLAAPAQCAAAAAHLERALETAKSSRRFAPGEILAKDWDALTDADLAALAACGYRQASCEKLHFDQHAAFTSLCFLELHLTPQQLQAAAQRLFAAPECGQVLRVKGFAPAPAGGWLELNATAAGCTLAPIPQGQEVVIVIGEALDKAAIEANLKGMQEVRAAVIGTGVMGRKYAQMIAEGKAGALRLTAVVCRSAGAQQWAKDTLPDTVRVCPSADQLYDYAEEFDAVLVVTPHKTHPALVMQAFAHGKHVLCDKPSANALAPALEMNRAAEKSGLVFAMMFHQRRYKKYMRLKKLLDDGALGEIKRVQLENSRYFRTWMYHRSGSWRSSWAGEGGGALLNQGQHILDIWQWLFGMPTSIYAVIPYGKYNDFMVDDEATLLMEYPQQRTATFILSTGEGSYTERLEIVGTKGTALLEKDTLTLHTYTPDTETYRRTADCTERQQLTETTTTEQFVPQAEPYPEMLANFADAILHGTPLTAPGVEGVRALELTDAAYLSAWLGEKITLPLDADRFEQELQKHIQEEQTNGMAKLRFVVVGSGWRSLFYWRIAQALPERFELCAMLCRTEEKAEKMHREYGVPVSTSAEQCIALHPDFVVVAVNKASIAAVSTEWLARGFAVLCETPAALEEDALRALWQLHRQGAKLQVAEQYWLYPTLAKRLAAVRSGALGTPQFVRLSVAHGYHAVSLARQFLNAGQQPVRVTGRSWTEKIIETDSRWGAVHNGALVEKTLQQHTLEFAGGGTAFLDFNGVQYHSYLRSTHTSVQGERGEVFDDTLRCLDAAGEPVCRLLTPLPDPLAAAAAQAGLNEDETAIACFLDRMQGYLAGGAEVYPLADALQDAYLALLMERSLAAGQPLESTPQPWNTEERMLYFENDYCEGAHPAILQKLTETNFEKVSGYGTDPYCASAREKIRAACACPEADVQFISGGTQSNAIVIASMLQRWQGVVAAATGHVAGHEAGAIEYTGHKVITLPQHNGKLDAAELRALVATFYADDNHDHMVFPGMVYISHPTEYGTLYTKAELEALHAVCQEYKMPLFLDGARLGYGLAAEGTDVTLADLARLTDVFYIGGTKVGALCGEAVVFPHGAPAHFMTMVKQQGALLAKGRLLGIQFDVLFTDGLYFSISKNAIATANRLKAGFAAKGYRFFMDSPTNQIFLVLENTQLAALEGKAKFGFWEKFDDTHTVVRIATSWATRMDEVEALIDLMMKYDERACKFNMDTGCVELLLRDGRMISINCTGVEDALDVTMAQRSELDYLIYNDPLGYADLILNGDPEEYLKNVTGSHGLEDMIYTVGEMAQKLGVPASTLRYYDKEGLLPFVERSSGGIRMFRENDFEWLQVIRCMKKAGMSIKDIRQYIELSMQGDDTIDTRLEMFRHQREVLTQQIQQLQHTLETVEYKCWFYEAAKAAGTVDIPGAMTDADVPEQFRAIRQELRGQKMPNSERMSKKVLILSGSPRKGGNSDILCDEFLRGAQDAGHKVEKIRVAEKKVAPCSGCYYCSTHGGACVHKDDMADILQKMIDADVIVLASPVYFYSISAQLKAVIDRTVARWLEVKDKEFYYITTMADEEKASADTTLACFRGYADCVEGAVEKGVLVAGGVYEPGAVCGTPAMAQAYEMGKNVMILQETYKLENGTKIPKLGLGTWCIDNDKAAQTVRTAVTLGYRLIDTAQAYKNEQGVGEGIRSCSVSREELFVASKVAAELKTYEAAAASIEETLEKMGLDYLDQMIIHAPQPWNEFRDTKRYFAENKAVWRALEDAQAAGKVRVIGVSNFLQDDLENLLSDCRIQPMVNQILLHISNTDHDLLNFCREQHIQVEAYSPIAHGEALKNPVIAQMAKKYGVSAAQLCVRYVLQLGAVALPKTADPQHMEENAAVDFVLTPEDMAALMQMEHIADYGEFSSFPVFSGKKQVMAVKQTAGRDALGEFAPKFAELNDEVLFGQVWSREDKLSLRDRSLVTVVALMAQGLTDSSFRYHLTAAKNNGITRTEIAEILTHAAFYAGWPKAWAAFRMAKEVWAEESAEDAKAKHQSEMVFPIGASNDGFAQYFSGKSYLAPLSTVQVGIYNVTFEPGCRNNWHIHHAAKGGGQILVCVAGRGYYQEWGKAPQELHPGDVVNIPPEVKHWHGAAPDCWFSHLAVEVPGEGTSNEWCEPVPEETYKELRWCVLTYTQPCASPIPSQGKLHFPCAALQLSFCGSRLRPKRTALRSKAASKTEYDSRPFIKSNLAGRSFCLGVMPIPCPHFKITIVKRSQGQSAVAGAAYQSGERLFSEYDQKTKFYNKKKELVHAEIMLPSHAPPGYADRATLWNAVEAVEMKQILIVEDDSFLNKMVAYNLTADGYGVTSALNARTAADAIRQREFDLVLLDINLPDGNGFELCKLIKPQHPDTIVIFLTANDQESDQIRGYEVGAVDYITKPFVIGALQRKIKAMFAMLEHHKPAKDIYDDGRLFLMAKIEDCPGFETFGADVKAARKAKQLSRSALADMIHCDSRYLANIENEGTLPSLPVVIQLIKICGLPVERYFNPELMREESAERQRVSHKLQLCPEEYLPIVEGAIDGALRIHEQEKEPVCVMTPEERELIRQKMALLHTRNFSAYARKMLIDGYVVHIDTTDIRAQTAELQKIGVNVNQIARRLNSMGPLYTQDVADIKGALAQIWQLQRYILSSQRMAVTKIHPIKSTLKKALDYIENPAKTDEKMLVSSFACAYETADIEFELLLSQAMQKGNNLAHHLIQSFAPDETTPEQAHEIGRQLADEVLQGKYPYVLTTHIDKGHVHNHIIFCAVDMVNQRKYVSNRRSYAYIRRTSDRLCKEHGLSVVMPGQDRGKSYAEWDAHRKGTSWKAKLKAAIDAAIPQAKDFDDFLRLLQEQSYEVKRGKYVSFRAPGQERFTRCKTLGEAYTEEAITERIKGRSVERKPKENHKISLRIDLENSIKAQQSAGYEKWAKLHNLKQAARTLNFLTEHKIDSYPDLESRVAEITAASTEAAAALKAAERRLAEMAVLIKDVTTCKELHPLLQEYQRAADKKQFRRKHEGTLILYEAAAKALKEQGFQKLPDLYALKNEYKQLAEQKDQMQRQYNDAKRQMQEYGIIKQNVDGILRTAPGKEQMQERMAEVNDNSSIQLFEDQKIRTAWDAEKEEWYFAIVDVIAVLTDSADPQNYWRVLKKRLKDEGNETITNCNGLKMTAPDGKKRKTDVANTEQLLRIIQSIPSPKAEPFKAWLAMVGKERIEETIDPEQAIDRALDTYLKKGYSEEWIHQRLLAIRIRNELTDEWKKRGVQKGKEYAILTDEISRAWSGMTTGQYKRLKGLTKENLRDNMTDLELVLTMLAEASTTDISKTAKPQTFEENKQVAKRGGKVAGIARQALEAETGKPVITEKNAFDFQQLVTDIVEDAAELPENPTEKKDKDMNFSVEEENLICMYHTSDRRRTMARMLAARPDMDTEMRQLTKGTIAKLERMTDADFDGQRFDFTGEMQRFENMDVIAALEAIMHQNTAYYQSDFAYDIKMLREAARSDQPEDKLLLWLSRPSGTFCFRERDVLLKDTQAYNTWKFCGEQTHDRILAYAVELTGAANGTVQGNLYELDYQQHFQHIRDAALPVGANRLIYESGMREIGPKEHFNSRSDKYFGEFVRYEMQPRDPELLQAAIRQEQRSREPARPGDFKEHLAALHTGLIEAEAQRIAANMKRLAAPNSPDKNHFMVEVSPYFTKLASSRDTDQLLAMLPYKSLHLSSVKDRFGIYALVGKNENRDKGICKPRTSVRKQLSETKQAASPKKAAARSKQHEMEVMSELFSIQLQNRQQQGRDGVWLDLPTTTEQVQAALRQIGISSDNLQGLFISGYFAEEEKRFAIPYNMVLASNVDELNFLASRLETLSTGERAELNAALQVPQSELSSIGRITDFPENVEYYVHLPEVRGPAQLGDYYLNRSGMVDMPEEWKGGIDTAQFGRYVAQQEQGVFTQYGYLVKSGDEWQKVHEGQPVPEEYRVLSFPVPEILRDAANIPPPMQSEPQPQKVLPIILNGKDSAERMKEITDRLETGIQELFDSDRYKAYLTTMAKFHNYSFNNTLLIAMQGGQLVAGFNKWKDTFHRTVKKGEKGIKILAPAPYKVKQKTEKLDEQGKPVLDKDGKPLTEEKTVQIPAFKVVSVFDVSQTEGEPLPSIAVNELSGSVQDYQDFFKALEQTSPVPIGFEDIEGGAHGYFHLLDNRIAIQEGMSQLQTIKTAIHEIAHAKLHAIDPTDPEQINRPDSRTREVQAESVAYAVCQHYGLDTSEYSFGYVAGWSSGRELAELKASLEIIRSAAHELISALDEHLAELRQQREADLSAAQEAAFALDNGSTLFIQTCDSGYDYTLYGPDNKALDGGQLDAPGLTLADAGQEALNLLGQTAPVSEILLGDKLAAFQDAAEKANELPASVKIPDPAAEPTVTILWSESDKLQDGEIMPLSVANRVFEELDTAQHTDREKDGYTGGWYDKTAFRIDFTLNGQPDNYEGRQDFGDGEGSLVQHIQNYHEYYAKDESWRNFVLHNKGPEAWEQDKAEREMVLNEFIPYLKQHCNISAMEQAATAALREVQNISPEQAAYYNTVVAYVQDCRSLLNQGQYNLPEPPKLADFDQSLQDYKAQVQAEIAQEAADAGMTVEEYAAAGFEAPQQDSFSIYQLRNEDSTRDYRFEPYDRLLATGLTVDKANYTEVYAAPLTAGTTLEDIYRTFNVDHPADFKGHSLSVSDVVVLHQNGQDTAHYCDSVGFQQVPEFLRENPLRTAELSTEQNENMIDGVLNNAPSLGELEAKAKAGEQISLTDLAAAVKAEEKAPKAKKSRTAKPKKPSIRAQLDATKKEQSKQTQPREKAKELEVMSVQLVIAEKPSVARSIAAVIGATEKQNGYWQGGGYLVSWCIGHLVSFAEAGQYDEKYCKWKYEDLPILPQPWQFIVPDEKKPQFEVLRALLNRPDVDSVTAATDAGREGELIFRFVYQMAGCTKPVKRLWISSMEDAAIREGFANLRPDSDYDALYQSALCRAKADWLVGINATRLFSVLYHKTLTVGRVQTPTLKMLVDRDAKILRFQKEKYYTVGIQSGSLKADSGRIADAETANSLKEKCTGANAVCTSIRREKKAEQPPKLYDLTTLQREANRLFGFTAKQTLDYAQQLYEKRLLTYPRTDSQYLTEDMGQTAQHLVFDLLELLPFAQELDLTPEVGRILNSKKVSDHHAILPTAEFVKQGFTGLAESECKLMNLVCSKLLCAVAAPHEYETVTAVFSCAGNEFTAKGKTVLVPGWKEIDQRFRSTLKADTEEEVLNTLPELAEGQNFSVTTDISEHFTSPPKAYTEDTLLSAMERAGAEDMPEATERKGLGTPATRAAILEKLVQMGFVQRKGKQLVPTKDGINLAVVLPESLTSPSLTAEWENRLTDIAKGNADPDEFMAEIEAQVRQLVKTYSCISADKQNLFQSERVIVGKCPRCSENVYEGKKNFYCGNRSCQFVMWKNDRFFEQRKKAFTPKIAAALLKNGKAKVKGLYSEKTGKTYDATVLLADTGGKYVNYRVERKEMKPDNWNRFAAGLLAILLCLCSFSMPAFASGTDPAPEPLPEIIEEEPTTDGMEPEGVPITPKGNATLVDDFYGDKQLITVTTKAGNYFYILIDRANEDKETSVHFLNQVDDADLLALLDEEPQTAEVCTCTVKCEAGNVNENCPLCEKSLRNCTAPEAVKTDTETPEEKPKSNMGSLMILLVLALSGGGAALYYFKFRKPKADTTGHDDLDEYDFGEDEDADEEPAEIEIHSEDGQEDETMAKRLSRIERDIERLKEKISEYQQQLKELEAEKTEQENLQIIQLVRSMNMKPDEFAAFLRSGALNAAPTVTPYHKQEDAADETMKELQAKAKVTQTMTRDGLVVENQADGTVENVSCREAEQDYSTDAEGKAEKILERAEDIKDGHKNKKKAKKAAETAATAKSEDGLHRSAARLELTKDERADPELQPYIHKAEAKADKLDAARAALPKKRVPVKEKVYDAASGKAKSTLRFEQQDKGPPSLKPNPASRPLSEALLFAHGKIHEVEHENVGVEGGHKGEELVERQTAKAIRSGIRHHKMKPYKAVEKAERQLMSANAEYFYQKSLRDNPQIAQAASNPISRMWQKRRIKQQYAKAARQAGQAAAQGAAATAENGFRVTKLAAEGGERVAEFAAWNWKTILIVAVFGLLALLLITGLQSCTVMAGTAGTGVTASSYFSKDKDMLGAEKAYAKLEQKLQRYLDTYEATHNYDEYHFYLDEIEHDPYVLISILSALHDGVFTLAEVQGELEMLFEKQYILTETVTMQIRYRTKMMVIIGPYGVPQVITYQEPYEYYICTVKLKNKDLSHLPVEVLTEEQLSAYSLYMRTLGNRPDLFGQAQYPNASTIKQPTYYDIPPEALKDDKFAAMMEEATKYIGYPYVWGGSSPSTSFDCSGYISWVLNHSGWNVGRQTAQGLYNLCTPVSTAQVKPGDLVFFKGTYDTPGVSHCGIYVGNSIMLHCGDPISYTNLNSKYWQEHFYSYGRLPMSLTHFSLFSGIGGIDLAAEAAGFTSVCQCEWAAFPAAVLASHWPEVPRFQDITTVTKEAFFEKTGLRTVTLISGGFPCQPFSTAGRQRGFHDERYLWPEMLRVIRELQPRWVLGENVAGFLRMGLDKTLIDLEQAGYDVRVFVLPAAAVGAWHERKRVFIIGSAASHAPCQRHRGCGQGAGHPNLCEWQLPQDEQGWQSMDGAALSCGLPHDPHHAGKALPQPGLGRVADGFPAQMDGHSLWAEEPADIPRLTEEVPNRSKRMKTLGNAVSPPQVFPILKYIADIETGCCPMGGEEPMSRKTIPRETEKPKKLTRAQKKEIDAVLRKYKGDGKPRTAQATIPYEAIYPDGVCRIDRRTFSKCIAFEDISYQLAQPETRTAIFEHLCDLYNYVDASIHVQLSFLNRKVDPVQYAKSFEIAPQGDDFDDIRAEYTAILQKQLASGNNGIVKTKYLTFTIEADNLKTARARLTRIGLDLLGYFKTMGCVAHVMDGQARLEVLHGIFHPDGEPFRFDWDWLAPSGLSTKDFVAPSSLCFGTAKTFGLGGKYGAVSFLQILAPELSDEMLADFLKTESGILVNLHVQAIDQTEAIKTIKRKITDLDAMKIQEQKKAVRSGYDMDILPSDLATYGEDAKKLLNKLQTRNERLFMLTFLVLNVADTKQKLGNDVFQAAGVAQKYNCSLVRLDYQQEQGLVSSLPLGINQIKIQRSLTTSNVAVFVPFVTQELFQSGAAMYYGINAKSHNMIMLDRKQARCPNGLKLGTPGSGKSMSCKSEIVSVFLTTADDIFISDPEAEYYPLVKRLHGQVIKLSPTSKDYVNPLDINLNYSEDDSPLALKSDFVLSFCELVMGGKTGLEAIERTVIDRAVKAIYRPYLANPCPENMPILSDLHQALIDQHLPEADRVAQALDLYVSGSLNVFNHKTNVDIHNRLVAFDIKELGKQLKKLGMLIIQDQIWGRVTQNRSQGRATWYFADEFHLLLKEEQTAAYSAEIWKRFRKWGGVPTGATQNVKDLLSSPEIENILENSDFITLLNQASGDRKILSERLNLSADQQKYIDNSEPGEGLLIFENVVLPFSNPIPKNTQLYKIMTTRLSEVVELMISEIIEKWIKGILIDGITGNLSGLFDNVNAKVGEIASDVGSTPQAWNSGIFNMLRSLSETVVLPIAAAILALVMCHELIQMITEKNNMHDFDTSMFFRWIFKSAFAILIVSNTWNIVMGVFDATQSVVNQSSGVIIGETSIHFDRLIPGLEFQLESMTIGSLLSLWFQTLVVGLTMNILSICIFLVTYGRMIEIYVVTALGPIPLATMGSSEWRSTGQNYLKSLLALGFQAFLIMIVVGIYAVLIRNISGAADIAGAIWGCMGYTVLLCFCLFKTGSISKSVFGAHMEFFNSAVDTLQTIVVGLGGALCVWGGINLLEGYGQDNPGSKSQGVKQLVAGGGVALIGVTLVPLLSGLLGMKPELKKLLVLNLPYLLFVYLFAKCGQAYRLAAGADASAKLLHLTNGISAAFANPLPSLHPFDLCVGVVGAVAVRLIVYSKGKNAKKYRKGEEYGSARWGTAKDIAPYIDPKFENNILLTQTERLTMTGRPKDPKTARNKNVLVIGGSGSGKTRFYVKPNLMQCFPTSDYPTSFVVTDPKGTLVLETGQMFQRAGYRVKILNTINFSKSMKYNPFVYIHSEKDVLKLVNTLIANTKGEGEKSAEDFWVKSERLFYTALIGYIWYEAPAEEMNFTTLLEMINASETREDDPEFQSPVDLMFERLEQKDPDHFAVRQYKKFLLSAGKTRSSILISCGARLAPFDIREVRELMEDDEMELDTIGDEKTVLFLIMSDTDTTFNFILAMLQSQLINLLCDRADDKYGGRLPVHVRLILDEFANIGQIPNFDKLIATIRSREISASIILQSQSQLKAIYKDAAEIISDNCDSVLFLSGRGKNAKEISDALGKETIDSFNTSENRGSQTSHGLNYQKLGKALMSEDEIAIMDGGRCILQLRGVRPFFSEKFDITKHPHYKYLADADKKNTFDVDRFLSSLRRKRQQVVAQDESFDLYEIDLSDEDAAAEMQEEVTQKTIALSMKTGKLTAQALQAALKKYLQHRAKGPKLHHGKQSLKQLKAHGAALTNIEVTEANIGAFKPCAKKYGVDFTLRKDKTTQPPHYIVIFKAKDADNLEQAFREFTAKTLTKEQRPSIRKVLAVAKQKAAQQPKRAKEKVKQRGLERMAVFRVEKNSGYTVMSNHHLRNRALSLKAKGLLSQMLSLPEDWDYTLQGLARINRESIDAIRQAIRELEQAGYIQRSRERDEKGRLRGADYVIFELPQPVPASVSPTLENPTLENPTQENPTLENPMQLNKDKLITEKQKKEGSNTDSIPIHSPNPLPLDEDEAAAPPPERTGSRKEAAYQIYRDLILENIEYDTLTQNPRIDREQLDEIVDILLETVCTNRKSIRVAGDDYPAELVKAKFLKLDSHHIEFVMDCLRDNTTKVRNIKQYLRAMLFNAPSTINSYYASLVAHDMAQPDWGRPPNTMPIVRYSILCVSALHINYHRNSNVIFNAFVAEFIALAIEHNVTRKMDCKLRAKNCGGCPLLGLDYAEQLKQKEEKVRTLVGKYGPVHPIRGMEQPYHYRNKVISTFAPGFGGKLTSGIYAANSHKVLPVESCLLQDEVLDKTMQAVRAAANACRYQPYDEDKGTGLLRHCLLRRGVATGQVMVVLVTAQPVLPGAKNFVKALLAEAAQRGVTVTTVVQNVNSRKTSVVLGEAEKVLYGKGFILDTLCGKTYAISPRSFYQINHAQTEVLYGLAVEAAKLTGKEVVLDAYCGIGTIGLTAADHAKQVVGVELNRDAVQDAIGNAKHNGVKNARFFAADATRWISEAAAAGEKADVIFMDPPREGSTPEFLASVARMAPKRVVYVSCNPVTLARDLATLTKLGYKAEGFTPVDMFPHTEHVEAIVSLQREIMKIMVFDVGGTEIKYSVMDEQMHRTDSGAVPTPQDTQAQFLDAVYRLYAPHKDEVTGIAMALPGFVDNRTGYVSNGGALLYNTATPVGQLLAEKCGCPVILENDGKAAAMAELANGALKDCCNAAVFIIGTGVGGGIIANGQLVRGVHFTAGEYSFVNTNAEAWDAPDQNMACQCSTSNLLKWYRARKALPEDAPLDGRSFFAAANAGEPEALEVLRRFCHAVAVQIYNLTVLLDVEKVAIGGGISKQPLLLESLRSAYDGLYASRAGQAYMEGLPRCQIVPCAFSSEANQVGVAAAYFEAMQKKCMNTLHKFAVLTLSAVLTVCLLAGCGASASSTASSAASSVASSVAASEVASSAASKAQATVEFTVTAADGSVSSVLLNVTDGEKLSTALAEAGIISQEEADAGFVTTVNGETADYDKDQAWWCLTDAAGEMTTVGVADIELHDGDSYAFTYTKGMALHTRVLRLVLSGLMGALLVVSKQAMSGLPNLEPVSLLIILFALELPRETPGAITVFILLQGVLYGFGLWWVMYLYVWYLLALLAWLLRRMDNAFFWAVFSGLYGLCFGGLCAAVYLFAKTPAFALSWWLSGLSYDAMHGVGNFVLMLLLYRPLRRALQMAKKQLRVMNYEQAMEYIHAVQWAGHKPGLTRTRTLLAALGDPHKKLQFVHVAGTNGKGSTAAMLASCLQAAGYRVGLYTSPFINRFNERIQINGQQIPDEALVALVEQVKPAADAMEDVPTEFEIITALGMLYFAQQQCDIVVLEVGLGGTLDSTNVIEKPVCAVITALGMDHVKELGPTLADIAAAKAGIIKPGCPVVSYGGAPEADAVLRRVAAQQHAPFTEVDFAKLQITGGDLDAVTFSFDGLDGVRLPLIGSYQPRNAALAITALRVLRQQGWNIPESAIRTGLEQVSWPGRFELLRHSPAFVLDGSHNAHGMRATVQSLKDRFPGQKFVFLVSIMADKDVDEMLALLAPLAERFVTVTAHNPRAMPAQTLAEHIRAYGCTAEAVDSIEAGVARAEELGGEGPVCALGTLYFSGDVRQAFAKINKAMNDKKTSVRTLTMLALLVAMSIVFSRVLSISTGFVRFNLGSLPVLLAAVVFGPGAGFAVGAVADIIGGVLAGYAINPLITLGAGAIGLVAGFAWQKLSSLSTNLRLAASVLLGHFVGSMVITSLALRLFYGYPWATLAVRIPNALILSAVNVVLLRILLENRSLMKLAKKMKFSEMTYTRPDINALLARCKQLAAKAADAQDGDALIQVYYEQSRAFADYTTASQLANIHYTCDTRDAYWKAEQDFFDANGPAVTNASVEISRAFLANPYVDTLTEHFGTTCVAGMKNAVLGMDDRTVELQQEFNALVSQYQQIYGGALVELDGKQLTIPQLGPYKEDLDPAVRRAAYEAEAGYFDAHRNELDTLYTKIVKNLNQQAKVLGYKDYSELSYVRMNRIGYGQAEIQAFRDQVARDVVPELQKVMAMRAKRTGITHPTFTDLPIIFKDGNPKPIPGYQARMDAARTMYHELSPETAEFIDFMQDNELFDVESRPGKMSGGYMTSLPSYKAPFIFANWNNTSGDVDVLTHECGHAFEGYVAERDPNVPADLECPAMESAEIHSMAMEFLTAPWHHLLFGKDTEKYALLHAEDSFVFLAYGCAVDEFQHIMYQNPDLTPDQRNAEWLKLEKKYRPWIDFDNLPFYGRGAGWQRQLHIYECPFYYIDYCLSTMAALQFFLLSLDDHKDAWERYLKLVRRAGLASYTELLQTAGLKVPFEEGSVKGIAQQMTRWLEEHQVGMRSSRLFRRVVAGLCAAAMLCGGMAASAAAPALPAAPAAVEATNAAPSDAELKAAFSKFTVTYDEEAGGWDLSSPQEQASMDKKSCGLYPYMFLQDDSIAFNMILTYVGSKKLDIKTVNVSADDELYTFTCDEEYGGGYDQDLGCWFDLELFQLSDEEVSLLSEWLNAKSVTAVFVGRDGTTQSYALTKENRTAIQEMVTAYNLMLSSTVEQCEPILTSLAKMTEQNKTPLTAQPGRAPAPEQKPAEKRPAEKPLRRVGSLTLGACLIAAGVFFLLYFFVPGFDVQLTLKIAPAVALVLLGCEVLFFAARPGRWKYDFVSVLVCLVLMAGCFCMAMLPMLWDELSGENQQTMNRLSAQAIDELYTACKQDAQDIPIRDISGRMFLSGPQAETLQQAAALPAGDTYLTLTVELFGPYDSAAAFARDCYTLTALAKQCTVPPENLHFTWDARSPAESSLNTGSLLYTEDYSLDLSGAVQLDWTEQQMEQQTETEYLLDAENIPDEDMKKNGILTLLFACIPGAGQMYQGYMKRGLSLITMFCLFIILGSTTGLDALVVGCIVVYMYSFFDTLNLRAQLAAEKAPEDDYLVHFNWHDARMTQFMGESHKLVGWGLIALGAIVFYNNIIMRVLGDVMWRWGQDNPVFRAIYLMLDALPQIVVCVALIVCGMWLVRGPKNKKGKQPAEEEPEDFHAYTAAPQAEDAEDAADTADTDAHFAMPELSALLGEPVTDAEQNETPAEDDDDRAEMELFDAKGCLSEEGLQALVGGQLDETQRLEAAEHLAYCDRCMDRYTALLTDDVLEQPPRSARGAVMGTIWIRLMQNTWGRAAVATVAAVLALTLWRAGTLEQILHTGQQLNTWLPQTTQQTEPELLGKPVNDKAPQPSTAPLGKPIEDKKQLTEKLSDALDALLHHSADTTEKMVQKYQALVYTVCHQLVPDVQEAQDLTQETFLAAWRAIDRCPPGFEKQWLARIAANKAKDYLRSAWVRKMNTPGDEVLALEGAPPGMQPEQQVLEALGEEELTEMILNLREPYCTPCRLVLLEQHTMAEAARLCGRPPKTVEAQVYRAKKMLAQQILQNDRIPCERRSVHGTVMLNSCVVNALHGLLSGFGCGTLRRPSVFNTKERRQFLQKTKIFSNFFFCRRYGTIAVMASTTRQALLQALSAAEGAYISGQQLAQQLGVSRAAVHKAAAALTAQGYALEAASRRGYRLLGGDPFCTEAVGPYPAPVQLYDTLESTNRTAKLLALEGAAHGTLVLAGGQTAGRGRLGRSFASPAGKGVYCSVVLRPPLPAANAQTATIGAAVAVCRAVQMLCGLELAIKWVNDLYYKGKKVCGILTEAGTDLESGQLEWLVVGIGLNLTATAEDFPPELAAKAGSLYPGGPAPVSRAALAGAIGRELLALCPGFACLDEYRARCFVPGHWVTVCTGTETYAAQALSIDDAGRLVVQREGGRTEALRCGEVTIRPTKTEMNIVSAVILCTIVGAVGAIVLVAAAKFMAVEEDPRIEEVSACLAGANCGGCGYAGCSDYAKAVVLDGVPCDKCAPGGPKAAAAIAKIMGGEASAVEKKAVVQCQGSSEHCKPAYDYKGIQTCAAAAALYGGPKTCSFACIGLGDCTKVCKFDAIHIVDGVAKVDKDKCTGCGACANICPKQVIMIDAAGPRKPVVMCSNKDKGAVANKLCTTSCIACGMCERTCKFDAIHVVDGVARIDYDKCKGCGMCAQKCPKHIILFPLKDDPNPPKPVVKPAAPAAAPAAKPEAKAEAKPETKAEMLVKLAAIFFSMILVNNYVLVKFYGICPFLGVSKKLDSAVGMSGAVIFVMFMATAVTFPIQIFILDPAGLGYLQTIVFILVIAVLVQFIEIFLKKYIVALYNSLGVYLPLITTNCCVLAVTILVVGDYGADVAAHGFGYAYIEALICAIGAGCGFMLAMVMFSGVRKRVEACDPPAPFKGLPITLIAAAITSLSFMGFGGIVENLFNVTLMAQENKSKVSILTNGIIKENPVLRLVLGTCSILAVTTAVSSALGMGAAFTFVLVCSNIMISLLRKVIPGKVHLPCYIVIIAGFVTIVQMFMQAYMESLYNALGVFLPLIVVNCIILGRAEMFACKNNVVDSALDGVGMGLGYTLTATLMASIREILGSGTWLGFQIIPESVAKVSIMTQAPGAFFCFGLLMAGCVWLEGKLDARIERKSCCDLDNLKKEAEMSKTANSSWETTGKPIVVLTVISLIVSLLLALVNGMTAPVIKENTRRTTLAAYVSVMPSVSDAATLEEVTDYTTANVTGVVKAPDGGIAIKAEEKGFDGGILTVIMGFDANGAETGIWVDASTQTKGIGSNVSTDDFLAQFNGMDGTKNIVMNQDFDAYSGATISSTALFAAINDCINCFNELAMDTKLIVSASPHVRSDETTQSLMANVIVALCPCVVASAIIFGVRALLVTAVSVVACVVFEWLYCKLLKRANPISDLSAVVTGIILAMNVPVGMPIGQLIIGDLVAIIVVKQLFGGIGMNFANPALVGRIVLFISFAGSMNKWVFPDAAVDQLSKATPLAVADPSKLSLLDLFMGIHGGVLGETCALAIVLGLIYLVATKTISIAIPASYVGSVFVFYLIATKDLHSALVAVLSGGLLFGAVFMATDYVTSPFTLKGKLVYGVCLGIVTFAIRYWGSYTEGVSFALLFMNLWVPYINDLTRQTPYGYVKPAKKAKEGAGKMLNKLKRAALGAHTPHDKATAASKPIPMPLPAQVRILMSQHIGAPAKALVKKGDEVFVGTKIGEAGGFVSANIHSSVSGTVAAVEPFRLSNGRMCDSVVIKTDGKQTVDPAVKAPEVTDKASFLAAVRECGLVGLGGAGFPTDVKLQPKQSVDTLLINASECEVWLTSDTQEMLECSDDIIRGIKAVLQYTGIPKCIIGIENNKPECIDLLCKKTKDDSAIEVKPLPSVYGTGAELILIEKCLGREVPHGGLPADAGAIVMNVTSVSTLGKYLATGMPVVQRTITVDGDACAKPQNVVVPVGTAYQDILDYVGVKGELGKVVAGGAMMGPAVENLSYPTTKTTSGLILLSKAAAQPAQVNPCIRCGRCVEYCPMGLEPVEVNQAYAARDVQELGKLHADYCFNCGSCSFVCPAKRPVTQMMSLAKAFYLGEIKKGGNKMKVLKALLAVLTTLAVALTAILLLWQDKSAPRYIKIYENEQMKLWKRWTAAALAAAMALLLLAACGPSGPSAPDTPDKPGSSETGKDPTDEKTEAQKVAAVVEALNTVRKNNGNNTPLTMDADACVMAEKMAKLQLDWLLGQYSNDPNGERYTKDWNDISKLTVKDKKLVGVGGYAAYPTESVIRGWVKDTGKWKPALVTSTEATLVGVGVVHNTDPKTRDEYPIMVVVMTYMPKTGTVYLQDAACSCPGRLIAGCGKEETMKLFKKLAAVVLAAALALTMVGCGGNSYAMQNELLKISIDYMTDRGKTVTHTKKADDLAAALLAAADTAAAQKENEGTKAKELLKDPAVIKAAGIDPEKTPCEVNLIDNIQFKSSGIIGEHLKMEWMASVTSPSQFVPIGTSRPGDNKVEIGAATHKIGDENYILILITYTPTTPSITMKLFKKLAAAVLVAALALMMVGCGGSETVLARQIKGAVSDTAVIMQGKQATDSKELDALAAKLLTEIDKALAESEEGEWPDPNVLLNDEEFLKKVGIDPATEAYALSLTRNPSYLSNTMNQAKPFEIAGDLLYRLMQGDLKIGEPKLGSKFEFGLAIGTLDGKNCVLMIAKMNIKGHFETITRHKLLVMKYCFECGLYEQGLAHDLSKYSPTEFIPGCIYYQGDHSPNEAERAAKGYTSAWLHHKGRNKHHLEYWIDYSTTKTGLTGMKIPLRYVCEMVCDRVAASQIYLGDKYTDASAWEYYQRSKDHYLMHPETRALLEKLLCMVRDLGRERTFAYMKFLLGCENDYMNVRLKRAKELAGYAVQLTKEEGLPTMVKRGAGFVKRRCFGKRARYLPAKKVLEAQRAEMAGKTAADCGLPTISVLTPLYNTPEKYLREFLDSFVGQTAPNGQLCLADASDAAHGDVGRIVKEYQQKNQQIVYKKIENKGIAANTNAAAQLATGEYLALADHDDILAPHALYTMGKAILQLRQRGEPDGFLYSDEALFTKSIHRPMVAHFKPDYAPDYLLCCNYICHLAVFQKALWEQLGGERPECDGSQDHDLFLRLLEKTGGAAHVPQVLYYWRVHAGSTSGGADAKPYVAATAKKALADHLTRTGRTGTVEDGLFPSTYRVKWDIVGEPKVSILIPNKDHTEDLEKCLHSIWTKTEWEHFEVIVVENNSTDPATFAYYKKAQQRYDGLRVVTYPKKGFNFSGINNFGRKYATGEYLLLLNNDVEVRSGEWLTELLRQCAHPGGAAVCGAMLFYPDETIQHAGVITGLGGYAGHSHKYKKAGGSGYLFRTATVQDFSAVTGACLLVKTSVWDEVKGLDEAFAVAFNDVDFCLRVRDAGYRIAWTPYAQLTHYESKSRGGDEKDPVKARRFAAEQQRLYEVHGKANILHDPYYNPNLTMDREDFSESDDLRGLKEGRITVQWREMEPIIKVDNVSMCFNLSKEKHESLKEYFLAMVQGRLQYDEFYALKDVSLDIMPGDFYGLVGLNGSGKSTLLKTIAGVYKPSKGKVTVNGTIAPLIELGAGFDMDLTARENIYLNGTVLGFSPKYLDEKFDEIVEFSELENFLDVPLKNYSSGMVARIGFAIATITKPDILIADEVLSVGDFLFQQKCEKRMQELMAGGTTVILVSHSIEQIERMCTKVAWLSHGHLKMNGDTQTVCAAYKATQRGEVMWNGFWRYRYLLWNLVSRDFKLKYRRSVLGVVWSVLNPLLMCLVYWAVFSSLMDMRGSGIDNFAVFLMCGQLLFNFFNEATSTSMSSVLSAAPLLKKVYIPKYIFPLEKCCFAMVNCIFSFVALLLVMIFTGAPFHLTIFEALYPLVTLFFFSLGVSMFLAAATVFFRDIMHIWSVFVTALLYFSAIFYDPTQMTFSIGGFNMQQIIKLNPMYWYITGFRRTVMWGIPLDVNMFLVCGICAVVSMVVGLQVFRKTQDHFVLHIMGKFIFTQTEIPGVVVIEPQVFGDDRGYFMETYQKDQFAEAGIDKEFVQDNQSRSTRGVLRGLHFQKNHTQGKLVRVTKGEVYDVAVDCRPHSATFGKWVGVTLSEDNKKMFYIPEGFAHGFLVLSDVAEFCYKCTDVYDPTSEGGIPYDDPTVNVQWPDCGCEHKTSAKDKLHEPFAAQKFEYFEKWMKKFTAALCTVLLLIGAVLVPGAAAAGPALANTRAYCIMDADTGLVLAQQNMDEELHPASITKVMTLGLACEKAQGDWDDVKLTVTHEDVYSLAGTDSSHIALREGEEVPLVDALYATQMASANDGANLLAEYFGGGTIADGVAAMNAQVEELGLAHTHFSNPHGISDDDHYTSCYDMAQILRWALQQPGFEDLFTRNEMYTMQPTNIQPVTRYFSQQDKIRIGSSRYHIDSVLGSKLGYTNTARYSYVCLAEQDGVRLICATMQSQLSTDKYNDMRTLLDYAFSTYKSYTQLPGGTVTAQLAVAGGGQSLGTVTVADPGVKLLLAEGLSAQDVTVDLELPEQYLLGAEPAVYAVYTLNGGAQQESTSVRVKAEITGLAELLEQSVGTKLEAARDVEPGSSAWLLAGISVGCTIGAAVVTVLVLRVHSRLKKRRKTARHHKKAMITEKKGCLAFAVCGSFCTLEDALGAAQALTAQGWTLLPVMSFAVQQDTRFGTGESWRQRLQAVTGQPVLDTLQAVEPLGPRRLAQALVVAPCTGATLARLAAGLSDTPVTLAAKSLLRVGSPVVLAVSTNDGLGASGENMARLCQRKHYYFVPYGQDDPFAKPQSLKADLALLPAAVDAALRGEQLQPVLLGQRNAMRQTKRFAVVGSDARQAAAGRALARAGYTVGGVQQLPQADCILLPLPLEQPGLPLAQLLGMAKPGALALGGKVTDSARTIARAAGVELVDYFARPELTVYNAIPTAEGCIGILLERRSRTLWGAAVLVLGFGPVGRALAVRLAALGARVTVAARRPVQRAMAEELGLLAVPLTDLAAAAAAFDTVVNTIPAPVLTAQVLAALPKGCLIVDLASKPGGTDFAAARRLGHTALHALSLPTVWAPETAGEALARTVQAILQEREGTIMNRNKKPFTPNMRVTALYLLMGVLLLLAVTLFSGRESIRATEEYFDRTINFVKVQSTSYEKYNDTITAKSLRRMAVSVRQLAENDALDLYDPEALRKETESLWLTGIAVLDENGESLCEYTDGNIGYAQFAESLREQAALNVLQNPQKTYLKRILLQDGTAVDVATRRAAAGDAVLLAYRVTPPEFVEGTALSIQSVLDGYPKNISGTIFIVQDNKVIAANDPSLIGLYTTNSPLVQGIRKAGAPDILTHTRDWANSGCYFGMYSNGQNFDLYLYIDEKSVFRNFSSALLTALIFYLICVAVLQTLRRRSMKLAEQQKREQEQKYHAQLEEQNRKLELAVRHEAAANRAKREFLFNMSHDIRTPMNAIIGFTSLAATHVDNKEQVLDYLKKISTSSQHLLSLINDVLDMSRIESGKVKIEEKAVHLPDLVHDIRSIIQPNISSKRLSLFIDTMDVVDEDIITDPLRLNQVLLNILSNAIKFTPTGGMVSIRIAQKPGAPKGCGNYEFRIKDNGIGINKEFQKHIFEEFTREESSTVSGIQGTGLGLSITKNIVDLMGGTITLESEPGKGSEFIVNLCFPLSGQKAEIKQLPQLEGLRALVADDDTNTCLSVSTMLSKIGMRPEWTISGKEAVIRTKYAVEQGDAFSVYIIDWLIPDMNGIEIVRQIRKVIGDSCPIIILTAYDWADIEEEARAAGVTAFCEKPLFLSELRKVLAEPFRVQPEQTTAPQPKASFDGKHLLLVEDNALNREIAIEILKEAGFLVDTAGDGVEAVEKMEQSVPGQYDLILMDIQMPRMDGYEATRRIRALPDPRKAGIPIFAMTANAFEEDKQNALNAGMNGHIAKPLDIPHLLKVLEEALKMTEQRFNHKIPRRTFLKVCAAAAAAGLTACGKTQAAAALPELTVGSDNYPPFIYLNNDSTPTGIDVDIATEVFARMGYAVRFEIIDWEQKTNLVESGAIDCIWSCFSMDGREQLYRWVGPYMVSRQVVAVNADSGIETLADLAGKTMMVQSTTKPEEIFLAGTDPRIPQFGELLSAEDRSVQYAMLNCGYVDAIAAHEAAILRYMQDCNANFRILEEPLLVTGIGVAFALNDTRGLDEKLTETLAAMRADGTMKQIVGKYLPDPEKYLEVDALEPMETDETIKKGFLRLERYAQNIPGGFHCCAEDPENGYPFAYVSDRFLEILGWEREEFAARFDNRYTALLHPDDLAAGLRYRNAENSATYAKNGDSIFRILGKNGYRWVTNAANQVEWYGKGYIVGTITDITPYMELREKLEQQNRTQREALETANHNLLRMMQQMEEQKAQFAQTTARSMEKEKRYRQRLNHDALTGTYNRRYYEDVVRNNLGPAGIALMDIDDFKICNDTYGHHAGDLALETVAKAIRSCIRETDLLIRYGGDEFLLVLPGIPADYFKVKLEQIRTAVQQTVVPGYPHFRLSLSIGGAMQTLADPIENVVRRADFIMYQAKNHKDAVAVDTQDSRLAAQKDVLGEKPVILLVDDSMMNRMMLAGILGEDYRILEAENGKQCLELLRANAGQISLVLLDINMPVMDGFEVLRTMNTNHTIEDVPVIMISSDDSEEAIRKAYELGASDYVNRPFDAKIVYRRVSNTIKLYAKQRRLVQMVSDQIRAREKNTDVLVGVLSQIVEFRNGESGSHVRHIRIITETLLHRLMELTSRYDLTPEQQDNIPLASALHDIGKIGIDEAILNKPGRLTAEEFAVIKTHSMLGAEMLQKTESFADQPLLQTAYEIARWHHERWDGRGYPDGLKGDDIPISAQLVSMADVYDALTSERCYKKAFPHETAVQMITNGECGAFNPLLLQCLLDVQGELKQEILQWMRCLTCLSIGKKCLHLGSFDDRIKMLQYAQKRGVQEGKVMFQGLGPLLSLLGGGSFTKLLLFLLKGLFGMNYLEIEAVVGREILDSRGNPTVEAEITLADGTVARGCAPSGASTGEFEALELRDGDKSRYLGKGVTKAVENINTVIADAVVGMDASDIYAIDAAMIKADGTKDKSNLGANAILAVSIVACRAAAASLEMPLYRFLGGVNGNRLPVPMMNILNGGAHAANTVDTQEFMIMPVGAPSFKEALRWCAEVFHALAGILKSKGLATSVGDEGGFAPNLSSDEETIETILAAIEKAGYLPGRDFMLAMDAAASEWKSPKGKGFYKLPKAGTEFTSAELIAHWKSLVEKYPIISIEDGLDEEDWEGWQQMTRELGGKVQLVGDDLFVTNTERLAKGIQLGAGNAILIKLNQIGSVSETLEAIKMAHKAGYNAISSHRSGETEDTTIADLAVALNTCQIKTGAPSRTERVAKYNQLLRIEEQLGESAVYPGMEAFMLTMCFLYGRYAKNFLYFLAIRFYTGCGIYAFFPFIVVIEEDFCNEMNKDLTVGKPSQVLWQFCLPMFGSIIFQQLYNIADSLVAGKFIGENALAAVGNSYEITLIFIAFAFGCNIGCSVIVSRYFGAKEYREMKTSVYTSLIGSAVLCAVLMGIGLFGCDALLELINTPEEILADSALYLDIYVLGLPFMFFYNIATGIFSALGDSKTPFYFLAVSSLSNIGVDILFVAGFQMGIAGVAWATFLCQGVSCVLAMVVVFRRIRAFHTEGHVQLFSWNMLGKVAVVAVPSILQQSFVSVGNIILQSIINTFGASVIAGYSAAVKLNNMVITSFTTLGNGISNYTSQNMGAGKMDRVKEGFGAGRNLVWLLCVPLVVLYFFFGRFLLLLFMNDPQGPAIDTGMLFLRILSPFYFVVSVKLVADGILRGCGLMVRFMIATFTDLILRVGIAAVLSATALGSTGIWMAWPVGWCIGTALSMVFYVTAIRKALAEPVAVAEAEGQAAEVRAEAEFAADAEMETLMKKMITRRQFMAAAGVVAAASALTACGGSSASTAASSAAGSAAASGSTIKVGVMGPLTGDASVYGQAVVNGASLYMKQVNADGGVNGKQLEIIAMDEQGDETQAVTCFTKMVDQGITALVGDVTTAPTLAVAAESADYNMPMVTASATAEAVTYDAETDTVNGNVFRACFTDPFQGVKMADYAYEKLGYTKAAVIFLKGKDYNEGLAENFAKEFEAKGGTVVDQESYSEGDVDFKTQLTSILGKNPEMVFCPNYYQEVGQILAQAESIGLTVPFLGGDGWDGLEGYATADQLKDSYFCACYAKGSSTAFEDAYKAEYGEAYPNGFAPLGYDAAMTVVYGIKAAEEQGLEAGSDEYKQAVIDAIAGGTIEGITGTFTFDEHHNPVKSTAILTYVDGKPELKEMFMTVFFSQLINGLSLGSIYALIALGYSMVYGIILLLNFAHGDVIMVGAYMSWFVMNQLGLGPVTAVCATIITCTLLGVVIEKIAYTPLRSAPRISLLITAIGVSFFLEYTAELILGSGAKVIPAYYTNQTFRLGKVPLGLTSIITLVVTVLSMLVLTFLVQKTKLGKAMRAVSEDMDAARLMGINVNSTISFTFAVGSALAGIGSVLYCCSYPQATPTMGSMLGLKAFVAAVLGGIGSIPGAMVGGIAIGLCECFVSAIGLSAWKDAVTFAILIIVLLVKPTGFLGRKVQEKVMNTKRKTLKMPVRYLMNLVLVGLLFVGLSYVTGNMLSTYQNKVLLTVGINIILAVSLNVATGYLGQLPLGHAGFMAVGAYACALFTKSSNLPKGVAFAIGLVLAWVIAGLFGVLIGIPALRLTGDYLAILTLGFGEIIRITLNNIDDVLGFKLFYGSKGLKNIPKYSNFTNVFLCVVITCFLIHAMMKSRHGRAVLAIRDNEIAAESCGIQTTYYKVMAFAFSAAFAGLAGGLYACYIGVLNPSTFGFMKSIEILVMVVLGGMGSMLGSILSATVLTILPEATRSFESYRMVVYSLVLVLMMIFRPGGLLGSYDFSLSRIVEKAMNGELFRKHTKKEAADHEMSEFKTRLHSVPSGGFLTDRDKDKKPILDVRELGIDFGGLTAVDNFNLMIGRNEIAGLIGPNGAGKTTVFNLLTNVYQPTRGSILIDGMPTAGKKTYQVNRMGVARTFQNIRLFKELSVIDNIKVGLHESMKYNLASSLLRMPNYWKEEKQCTERALELLDIFHMADLANAQAGSLPYGAQRRLEIMRALATGPKLLLLDEPAAGMNPSETAELTETIRRIRDEFNIAVLLIEHDMSLVMGICEGIAVLNFGRIIAKGTPDEIRDNPQVIEAYLGKKEGMADTLLKVDGINVYYGNIHAVKDISFTVNAGEIVTLIGANGAGKSTTLKTISGLLKPRTGDVLYKGKSIKGVRAHKIVESGLAQVPEGRHVFLHMTVDENLDMGAYTQPASTIAANKEKVFTLFPRLKERRKQLAGTMSGGEQQMLAMGRALMSNASMLMLDEPSMGLSPLLVQEIFDIIRDIHKEGMTILLVEQNAQMALSVADRAYVLETGRVVMDGTGAELLTNERVRNAYLGGMSKIIIPANYTPALNLYDTQRAIGTVKRLFADTLCATLNLYRVSAPLFLEASTGLNDDLNGVERKVTFDIKDSGTEAQVVQSLAKWKRQALKDYGFRVGKGLYCDMNAIRRDEELDNLHSVYVDQWDWEKIITVEDRNETYLKNVVRCIVSAVCATEMNLHAMFPQLQDLPLHTPNVTFVTSQELEDKYPDLTPKERENAFVKENGTTFLMKIGAPLRSGKPHDGRAPDYDDWDLNGDLLFWNDPLQCSYELSSMGIRVSPESMDKQLTMAGCDDRRTLPFHKAVLAGELPYTIGGGIGQSRLCMLLLGSVHIGEVQASVWDKATREACAKAGIPLLMRSGYFQRKKYFLFEIQPNLRAWLYFAFSFIKTKKGQPVGCPFFCFISYMFDIITDSACDLTLDTAKQLGIEVVPFYVSLDGEHYRKEGLEIPVRDFYQFMVDNPAAYPKTSLASIEDFEKAFRAHAEAGRAVLCLVFTGKMSGCVGSARNARDLVLEDYPDARIEVIDSAAATVTESTMVENAVAMRDAGCTLDETVTWLEAEKSTNQIFFTVGDLDYLIKGGRIGKVTGRAANMLGLKPMILFKDGEIFSGGVARGRQKSFEKALEQLMNYLDAHGGTPDDYRITVGYGYDADEGKRLWMQTRAALRAKYPGAQCEVGLLQIGCTIAVHTGPYALGMGVMRRWKKQNMLTAITGINWGDEGKGRMVDLISQEYDIVARYQGGNNAGHTVKNERGKFVLNLLPSGILRSNVVCVMGNGMVIDPHHLDGEINKLREQGIEITPANLKISDRATITMPYHVEQDGLEEARLSKTGAQFGSTKRGIAYAYGDKYMKKTLRMGDLLHLDDAVKKRLVTMVDSKNLVMEGSYNAAPISVDEMWAWLEKYAAIFKDYICDVGQYLADADAAGKKVLFEAQLGALRDIDFGIYPYTTSSNVIGAYAPIGAGIPGHKLNNSIGVMKAYSSCVGDGPFAAELAMTEEEKHALREAGHEYGAATGRPRRVGPIDLVASRYGVFCQGCDEVALTLLDVLDYMEKIPMVTAYKLTDGTTTTRFPMGEALDTAQPVVEYLPGWHCDITAARKWEDLPQQARDYVEYLEKAVGCKITYISVGAEREAYIHRGMTEEKIARINALAKKSKTVGLTEVEKAEQQTLRQEYLADIKASLRSQLERTSIQEPDGTIHKVTRRTDLTGERSMATQRNYAQQMDAVLAGLGGTRPRLLLHACCGPCSSAVLEQLCRYFEITMLYYNPNTWPAAEYYRRGEELQKFVAAAHPLGVTVVEDTYDPQQFYTAVAGLENEPERGSRCTVCYRLRMRRAAQYARDNGFDWFTTTLSISPHKDAARINAIGQELEAEFGVKHLPSDFKKHNGYLRSLQLSEQYGLYRQDYCGCEFSAKARGIEGMEQQNTRLRNAGFATFFFSGICAISAGVVVSLLQERYGFAYGMTGTLLSLMSVGNLLAGLLMGMLPSALGMKRSVLLLTIGYAVGYAVMGLTGAVALLAVAFFVVGIAKGSVINTCTILVSDHSADRTRGMNLMHSCYACGALLCPFLIAAAARVSTELAVFLLAVVGLVLWLVYVFTPLRGGKSKSSAEKEAIDWSFLRSARFWLLTGLLFFQNAAEQSVNGWMVTYFKGSGIIAGTLAAYTVTVMWGATLVGRLLIAFVFPLKNPRKAMVGMSVLCTVFYILLVMAHTQGAAIALLFAFAISMSGLNPTAVASAGRMTSVTSMGIMLPVASSGAILMPWVIGIVAERAGLAAGMASNIVPCVGLVVFTILVAKLPEEMYFFRREKIQCRYQFSLRDAVDITLLQRALTAALASAPYYTQRLVQEKREMWLEPNTEPCLVYPGSTMRNIPEQTNGYLFCVSCEGDTVYFDWHHFLLDGHGVSPLLTSILEQYCNLRYGTAFAVPQIVCDPPYDMEAMLAEYPPVEGGSDAIQRDVVQTYEGALRRTRVCLSKQSLVEKALANNAKPVSALMGLLCMAMREYLGKEKIQYSYSSDTRDVAGVPNALYNCVCSFGHTVQLQAQTRLADFVADVDADIRRDLQPESKRHRMADQMGWVYKVNQQKAPLRIKQRVFQMGEYIGGTISDFWLSYLGNPLMPATPELAQYTTDFGVWVPPDGASVGVEAASLNGKIILCIHNKAPNPGLADILRKTFESEGVAVLEAEDLDMERAEIISQITAILEDVAEVSPEDVTESSVLMDDLDLSSMEILTIVADLEETFGLRIPEKELRNFVTMGDLVDYLAANVGMIKVLDNVYDLVTLNMEQRFSERVALRFYDKETDEVTAVHYKDYARDIRRAVSYFQSTIPDIKGKKICLLNKNCYEYAVNTFGIILAGGVLVLLNQHKSWDELSYELGLVDPAAILTDGDDYGTKEQLQAAYGSILRPMDGFRAYEPVAQMPRCIGHDDLMILMFTSGTTGRSKGVMLSERNFFSVMRAHVQIGERMMEYKHDPELVVSQYTVLPMFHLGAFICLFSWAHGGWALNISGDIRNFYKEIRRMPSQVMAVVPVIMNSLHKDVMRGRKERLGELWVPICSSAMFDPQVMLDMATNGMFVVQTYGATETCGDGIINYAQDAKHIGAVGQGNDYLDYKLEPDGELCIRGDSIMLGYYKDPEATAAVIDKDGWFHTGDLARVDEDGYYYITGRKKNLIILDSGENLSPEELEGMLEKCPAVQECIVKELGKKIGVVVYCEKEHQQTVRDFIAQMNRTVPLYKRIGVVEFSETPLPRNATGKLVRKMRILGYAPAKFYLSLQSAGFRATIFSAKYQFRYGADCKTKLTVSIKSIILAIYHGNAVMETTKPRTVNSIGMFDMLKGAGMLAIVLGHTAELYPLQLEGGLSLTAFVGFIYRETLMAAFFIASGYGFRKRSISKCIHQQLKSLLKPFCYTAVFTTVLHFIIHYKTFHYLPGSMTESIKVAGGFLLGLPHTATYFGQEFFSCGPMWYLLALLMGWILLDVILNIFPERYIPWAVGGAALLGWGASLVWELPFCLIQGAVITPYLYLGYLAKRQHWLDQPLSRRMSCILWAAVLLIPAAALATRRTDCVSMAEWSLGPISILLDGLAGLLFIRLFLRWSQRRNPLVRFFEAIGRRSLYIFCVHTVELIAIPWYLFAAKYADRPVLGISLQYILSLGSIWLICALLQRRRDLIIKLFPARRRTPQVHYAPRHMNHDAPMTPAAMQAHIAELEQQLKLSDEGVSQLAQRCLELEQQLLACQTELAKHSAEAENITLTLPQLFYDTGSGFSPRECLTATEDVYNELTHEVSVTFVLPEDARAIRLDPGELACCITDLAISDERISFQSVNGLLLQEDSLLFLDVDPNLSLHCTTGFGAGMKFAVNYHYYPLGRFLHEQPGKSLLRALNDLKLENAAAAQEAEEVLQASRAECMRLNQQLLTLQGIQHEYQVSLETMRASSSWRLTAPLRRLLNLVRGHMYTSYSTLQRKQLCKQVYTDTQSTYLLVYAPGRHKALQAALQNQLHRKFRLVTQLEDELTPDVAGVLLVSEDVECTPTALTYFAAALREGADLAVCDASFGFDGSTALYLSTRHLPGSSCALVSRALLDKVRAAARGKDSVTELLRLAHAMAQHSRCIPQALLHFRRELCADDVFSAKGRRALILSHELTMTGAPIVLVSAVPVLRSLGFEVVVLGPSDEGSLPLFLDAGAAVVTRSDCVTSSALWGLATSADFVLANTVVEAPVVNTLNGSFVPVLWWLHDAFAGYPFISHSIPKALGKNVHLCAVGSHATAAMHSVRPDFEIEQLIYGLPDYAAEQFPRYDISFAGGRPLFVTVGSLEHRKGPDIFCNAIRLLPSAVREKAAFLFVGKAADKGMYNAVDSLVRDYPQTVFYRKRLERPEVKSLMEQCNCVVCASRDDPMPTFVTEGLIFGKPSIVSEHTGTAGLVTEGVDGFLYKDDDPQQLADKLAWAIEHPEALAAMHGSCRRLYEQQFSNESYVATLTRLVKELTDGEESMSQAAAQQPSRKKAVISLLVLLALTCIIVFTFKDHWAEITAALAQLSVWQVLAVLAVGLSYPLLEGCVAWVIVRSRLPQFTLRQGLDVGWCGTFGNVVTLGAGAVPVQLYYLHKAGLPLGPGAGLMTLEYVFHKSTVLLYATVMLLLQHRWLAANTTGVMRYLPMAYAVVAVIIVALVLLCVSPLVQNLARWLLGFLPKTEKWQQRRADWLEQLEVLGTESRRLLADKPRCLKIFALQALKLFGLFCLPYLCIRFMGLSPLGFWQVQLLTSLMLFVSNALPNVAGMGSIETAFLLVFGSFLKRGEVMSVLMLYRIASYYVVFAASAVGFFIAQRHLAQMEPPKEGMKSFHIPRTALFFILFALAAFAVLYHPIDLKALVRASSQGTLRTEEVAHFGSTNDMDYHLLSMDSEAFQQTAELLSTVSCRKKLNQRYSAYTHDTFPVQSVTVSFYDDAENQKFLLTVYSDGVCILNSAFVSVKYPGGGAAQLYEQLAELGQMCCRLRQPLLQGVDKNKNLPTKSCVIIIARTVLKSNRKQVGFLPAERLFFGQNVEKTPKPRRRSNFAKKFVNMIQFEQWEGFEGRIWKEEVNVRDFIQKNYTPYNGDESFLAGPTEATDKLWGALQQLQKAERAKGGVLDMETEVVSSLTSYGPGYIDENLKDLEQIVGLQTDKPLKRAFMPYGGIKMAEQACTTYGYQPSAELHKIFTDYTRTHNQAVFDAYTPEMKKARHTHIITGLPDTYGRGRIVGDYRRVALYGIDALIQFKQEDLANCGDGTMTDDVIRLREEIARQISALKGMKKMAEAYGYDISQPAKDAKEACQWLYFGYLAAIKTQNGAAMSVGRISTFLDIYIQRDLDKGILTESQAQELIDHMVMKFRMVKFARIPSYNQLFSGDPVWATLEVGGIGMDGRSMVTKNCYRFLHTLENMGPAPEPNLTVLYSSALPEAFKKYAAKVSVNTSSVQYENDDVMKPVWGDDYSICCCVSATQTGKEMQFFGARANLAKCLLYAINGGVDEKSHEQCGPNYAPITSEYLTYDEVLPKYVQMLDWLAGLYVNVLNLIQYMHDKYYYEEAEMALIDTDVRRTFATGIAGFSHVIDSLSAIKYAKVKVVRDENGLATGFETEGDFPKYGNDDDRADEIGVWLLKTFLEMIKKRHTYRNSEATTSILTITSNVVYGKYTGALPDGRAAFTPFAPGATPSYGAEQNGLLASLNSVAKLPYHWALDGISNTQTINPEALGHSEGERVENLVQVLDGYFDQGAHHLNVNVFGKEKLLDAMEHPEKEEYANFTIRVSGYAVKFIDLTREQQLDVLARTCHGVLMASCKTLGYVHSLESFGSVDGPGVRFVVFLQGCALRCKYCHNPETWAEGGEAWTAEALFQRVYRYRNYWGKKGGITVSGGEPLRQMDFLTEFFTLARAKGVHTALDTAGQPFRPDDPAYLAAFDRLMANTSLVILDLKEIDPERHRQLTGKDNANILAMARHISDLGIPLWIRHVLVPGLTDDEEGLRKTADFIRSLKTVQRVEVLPYHTLGLFKWQKLGIPYPLPDAVPPTAEQVKRAEELLEVSRYPGMQIFNTLTRQKEEFVPQVPGEYRIYVCGPTVYNYIHIGNARPLIVFDTLRRYLEYRGNKVIYVSNITDIDDKLIKKGQEEGTSMKEVAQRFEAEYLKDAAGLNCEKPTVQPRATEHIPQILDIVKDLIDSGHAYVAKNGDVYFRVKSDPGYGKLSHLNLDDLESGNRELRSRMEDDLKEDPADFAVWKAAKPGEPAWESPYGMGRPGWHIECSAMSRTHLGKTIDLHCGGQDLIFPHHENEIAQSECANGCEFARYWMHNGFINVDNQKMSKSLHNFFTVRDVANLYGYEPIRYFMLTAGYRMPLNYTVDLIESCKNSLERLYTCRENLDFALSKTDFGTDETLKEKAAEARTKFCTAMDDDLNTPDALASVFDLVKEINTLSAASSKAALETAAAAFDEITGVLGLLYNRKKDEVPAEVTELVEKRAAAKKAKDWATADAIRAQLTELGWAVKDTAQGPQLSKLMDKSPAEHTALRGFCRCGKIIFNRAMPERLRTLRHCIFTGLRPQLMARFTLPRDLYHGKGALEALKSFTGKKAMICVGGGSMKRFGFLDRAVEYLKEAGMEVELFEGIEPDPSVETVMRGAEAMLKFEPDWIIAMGGGSPIDAAKAMWIKYEYPEITFEEMCKVFGIPPLRRKAHFCAISSTSGTATEVTAFSIITDYQKGIKYPIADFEITPDVAIVDPDLAETMPKKLVAHTGMDAMTHAVEAYVSTAHCDYTDPLAIFAIRMIQGDLVDSYNGDMSKRDSMHNAQCLAGMAFSNALLGIVHSMAHKTGAAFADYGAHIIHGAANAMYLPKVIAFNAKDPEAKKRYGVIADEMKLGGANDDEKVKLLIEYLRGMNDALNIPHCIQHYGPDSYPTEQGFVPEEVFLERLPEIAKNAIADACTGSNPRQPSQEEMEKLLKCCYYDTEVDFMKFSTKSRYALRLMAELARYAPGTTVSLKEISERQNLSLKYLEQIVTPLARVGLVKSERGSQGGYRLTKDPADYTAGEILRAIEGSVAPIPCLGSVTNECPMSEQCFTLPFWAGLDEVINQYIDSVTLEQLASQLPAPDSAAQESCCSCGGAKNENKMTEKITAADAIRLLDTGKAVAVDVREPDEYAVGHIPGAKLLPLGQVIDRAAEVLPDKNALWLVYCRTGRRSADAVQKLEALGYTHLRDLGGILSWPYEIEGDFEGHFMSFHAKEFAGSHCGCRYQQDYRPTLGRDGKKESGTLEVIKFYYDGAIRFEQHCYGEAATFVFGVWASGMDEDGTLHWVLPDRRKSYYDESYLPKKLDRVDEAGNLYFDGGIFPWKLADDFAEDKRWGYPKWKVALGKLTGKGKKGDMENMEKVVYLDNAATTPCAPEALEMMVKALSGACGNPSSHYSIGYEAKEFVDTGRAQVAKAINASPAELFFTSCGSEADNWAVKGTAFTKARQNKKHLITSAFEHHAIMHSMAALERMGFEVTYIRPTSEGYIRPEDVEAAIRPDTALVSIMMANNEIGTIQPIKEIAEIAHKHGVWMHTDAVQAVGAIPVDVKELGVDMLSMSAHKFNGPKGMGALYCRKGVWPQNLIDGGSQEARHRAGTENVAGIAAMGKALEIATAHLDERMAHESELRDYVIDRILKNIPEARLNGGRSPRLPNNVNISFPGLEGETILLDLDMHGICASTGSACNSDSLDPSHVLLSIGLPEEIGHGSMRFTFGPQNTMEEAKYLCDVLEEVIPRRRAMSCMWLQGQNKARQFSLKGEQMASMYSAKVMEHFANPHNVGELPDANGVGEVGNPKCGDIMRMYLKIENNVIVDVKFLTFGCGAAIATSSMATDLIKGKTVDEALKLTNKAVVEALEGLPPVKVHCSVLAEQAVKAALSDYYRRQGIDPEPIVGKLEEDCEHCESCGHMNIKRAKEEIEHTVKAYLAKDALGEYAIPAIRQRPILLMGPPGIGKTQVMEQVARECGVALVAYTITHHTRQSAVGLPFIRQRHYGDKDVSVTEYTMSEIIASIYAKMEATGLSEGILFIDEINCVSETLAPTMLQFLQCKTFGNQAVPAGWVIVAAGNPPEYNKSVRDFDIVTLDRVRRMDIEPDLPVWKDYARAAHIHSAILSYLELHPQNFYQINADVDGTQFVTARGWEDLSNLLDTYEALGLQADEELIREYIQHPKIAEDFSAYLDLYYKYRDDYGVEEILAGQAKPAVFARLLQAPFDERLSLVSLLLAGLDTRFTASLQADAVADACYAFLRETKKALATLPEDIPDGSAELFSQQIKDYEAETQQKRDAGLLGKAELTNRLQVQAALHQWEGELRRANAAGTQEAFDLLRGQFGALADQREAAQKTAAAALEAAFDFMEQAFAESQEMVVFVTELTVNPASHQFLTENGCERYFKYNKDLLLDHRKAALQQELAAEQRRHGGVMPKEKFFDPRKPFQSQRPETHEEWQARMGGEVLAVVRSGLYLDFRFLDMALSALNPAPDERCRVLATDGQTLYYQPQRLLQLYQENPKYLNRLYLHTIFHCVFRHLWLKGRREPQLWSLACDIAVENVIDNLQRKSVMRPLTYVRQNAYRQITAEEKVVAAAPVYRWLTRQTPGVLRQLEREFVTDDHRLWPKDAPEQPQQMPTPLPQKTWQKIGERMQTELDLRDKEAGEGADALKQQVKAANRSRRSYKDFLRRFCVLREEVKLDPDEFDLNFYTYGLSVYGNLPLIEPLESRESKKIEELALVIDTSYSTSGELVRAFLAETYTLLKGRENFFHRMNLHLIQADNAVRQDILIRNEDELIHAMNHFELRGGGGTDFRPAFAYVDQLCAEKKFSNLRGLLYFTDGMGTYPARRPGYDTAFLFLGERFDDANVPPWAMKVVLDEEEFTGAAARPASALADALAEEDDLYRELNNSMVEQANELILDILPLSAQTARLVRVYGTAPCVALPGTLPAPAGGSFALTELGDYCFSEKPRSLPAADALCRYAVSADGTVRLTRAFGQAMGQKPARRYDFDLDAPAADEMELHPVCGSFLEEATLPDSVQVIGSCAFYNCRSLRLLTVGSGGLTVGSDVFLNCFALETLRVQAAPEQPTGLFALVNNITEAVQAQFWPADAPAPLAALWYPAYWEDIEETPAHILLHTFSGQGYHYRQCFLDNKFLPAEYDAIFPQGHDADDAAIMAMLCFGRLRYPWQLTEAAAGHYRAFLAANTDRVFARLLKAQDTDSIRALLALDVLDKAAFASAAALAAKAENAAAAALLADAEHKKYAPQSKKQRYDFDFMRWLLRFRKLDMRLKDQRQALVDTFINAIYLYDDKVLITFNYKEGTQTVTFGEAAEAASKGNGSDLDCFTAPQKRQLLIAVFFVLSRNSVMKKISRRSFLTAMAAVSAAGVLAACGASSSTASSVASSVAASSEATTSSEAVPESVTIKAFNGAKELVDVEVPFDPQRIAILDLASLDILDELGVGDRVVGTATTSLDYLQSYVTNDSIVNLGNIKEADMEAVMACEPDIIFIGGRLSKSYDALCEIAPVVFLATDAEKGVVESTRENAMTIASIFGLEDHVEALMADFDSRIDALKAFAEGKTAIVGMTTSGSFNVLGNDGRCSIIGKEIGFENIGVDANIDTSTHGNEASFEFIVDKNPDYIFAMDRDAAIGTDGAQMAQEILENELVKSTDAYKNGHVVYLAHPNVWYTAEGGIQALSEMLSDLENALLMFVKEITKRYDGKAVVDGVSFEIPKGKVLSLIGPNGAGKSTVMGMLSRLIARDSGLVDFEGTEITRWKSRELSKRLAILTQSNNVQMKLTVRELVAFGRFPYSGGRLTQEDNEIIDRAIAYMELGDFEEQFIDELSGGQRQRAYIAMVIAQDTEYILLDEPTNNLDIYHATNLMRIVRRLCDELGKTVILVLHEINYAAFYSDYICAFVDGKIAKFGTVQEVITKENLSDIYKVDFEIMQIEGKPLSIYYMKTHKNHLRLLILLLLVLLACAGYMTVGVHFENQKLFAYAMRIRTPKLIAMLITAFAIGSASIVFQSIINNTIVTPCLLGMDQLYSLIHTAVFFVAGSGSFLAVNANAAFAVDLAIMGAVATVIYSYLFRKTNHNVLYVLLIGTVLTSFFSSIQTTLTRVMDPNEYDTLLTDLVASFSNVNSAILVLSVVVLALVAFAFRKELVLLDVLTLGKDQAINLGVDYDRCIRRLLLGVTLYIATATAMVGPLAFLGLIIANLSRQFLRTYRHSQLITGSVLFGMAVLIGGQLLVERVFVYSVPVSVFITVGGGVYFLYLLLTQRKAMILSVCSLFVGVLDIRPSDLFTGSVETWEIFLISRLPRLLAILCTGIGMSVAGLIMQQLCMNKFVSPTTGATISSAQFGILLALLFAPGSTLWGRAAFSFVCAVLGTWIFVWFIQRIQFKDVVMVPLVGIMFSNIVMGVTNYLAYKYEMTQALSSWLVGHFSTVIRGRYELVWLTVPLVVLAFVFANHFNIVGMGKDFSQNLGVPYDLVLFMGLTIAAMITASVVVVVGSISYIGLIVPNIVAMFKGDQIRGTLVDTALFGAVFVLVCDMIGRVVIYPYELPIELIVGVIGSILFVGLLLYRLRHGRKAVRLGKAAKKTGGAAMITNEKPSSRLVQTNFFENKKRPPVCEETGLTCSHTARSAEGIISMKPANLPWYNKVKSKITLESLFLQSFHTRERGNTMSRFQAGALVVYGNLGVHEVEGVGLRRFCDEPAREYYTLRPYFSDSHDRSYIPTEKEAALRPVTPAQQAEADLARIKAEKLPIPAGVQTALAEHYQALLHTNDFYQYLTLFKELGQKQTQQQSRGRKINAMDTYFYQMVERVLREELAVAFGESQQEAGRRLLEVLRMLLVVRNHYSLPVWNLQRQFCTRIVLGILRRLHEANFVEDALMESSNQFLGTERIGKLMQKYAIPCIISLLVGALYNIVDQIFIANASYLGSYGNAANTVVFPLTVVALAIAVMIGDGCCAFVSISLGQNEVPKAKRSVGNAVVMCLVSSIVLAALYLIFADTILAMFGGTVNAETYHHSQEYFFYITLGVPFYMFGQAMNPIIRADGNPRFAMISTLAGAVLNIILDPIFIFGFRWGMMGAAVATVIGQLVTAALAVWYLLHMKIIRPEKGDYRLKGSICGRTLTLGMTSFLSQISLVAAMAAINNMIRKYGALDAVFGQEQYAQIPMAVVGIVMKFFQIVISIVVGMAAGCIPVVGFNMGAKKPARVKELFTKLLLAETAVGAVALVLVEGFPRQLIALFGAANESVYYTDFAVKSFRIYLCMIILACVNKACFIFLQAMGKAAESTALSMVREVVFGVGFALLLPRFFGLDGVLYSMPMSDILTFLIAGYLICKTYRELNGKGEVMLNVIIFLVGALIMFYMALRSVRARQQLRTKGVCVQATVSGTVQSRDGAAYVLEFTTAGGSHRLQYPKPAKGKPFAEGSVVTLYYDPDAPEKMFVEGDKSVLGAELLYTGIGAALLVLMVGIMNRMKLEHFGMAEPGDCRLVFTASAEELAAALAKEQAAPDAPQDEEELLTAAVNRTILEGFDPLYRQLVQEQQLVPVTDPDFELLAVNKAEGFRAGAQFYTLPPLELGQDTGFVQPIEPHPLRRLTIELEINRNYGDEERAADAAGKAALRDRVTRELYAKRCAQAKDRAEKELVWQLGDEVTGPVPKRLEAGNYFAEQRQFNLSLQANGINFDQFLAVRGQTVEQFRQWLHQQAERKLRSWLGLLLVAEREGLQPTEAEVNAALAHWNEKLDGERTFPANDTRKVRQRLARAKAAAFVVAHSTLTPPPSEPLVQEPEAKMLQPARERPGTAAQKGIGHRMQTALMGWVHQLGTLEYWEALLAGFEGLGPLVPILLAMVESFFPPLPLIAIVALNVAAHGGLLGFLYSWAGVALGGIIMFLFWRRLIKRFFWKVASRSPKLEKAQQWVNRFDTSSLFMLSLLPFTPTSFMHFAFGMSDFDEKRYLRAVLLGKGLMVAMMAVFGQSLVSSMKNPVYLVLAVLLWGGMYWVSKRFCRKHHLEMPRNLVLFDLEWNIGYQPYTFNYHGVQQTLRGEIVEIGAVKIDEDANVLDTFSIHLRPRIFRKLQHHIAKVTGLTQADLDKGEPIVQGLRRFMQWCGPDAEFAEWGLDDVPVLKQNLFLCNLDESRPTVWYDLQQVFLREHPRKEGEGMTLESVVTRMGIPMERPFHDALSDTLYTADVCRLLDLRAGLAAYPTEDEALRQSLCQTPGDYRDFTVFHGYVEQYAWRADPKISQMPCPECGTTLQPDEIWLKKGSNSWYTLCQCPSCTGSGNAAGQGVFQRYKLSRRDGLHWSFARCAQMPDAESLARWEKLRTAQLERMRAKAEKQAAEKMSDIKVLALDLDGTLTNDQKLVTPRTRAALDAAIEKGVTIVLASGRPTAGIQTLAEELGLDKKGGCILSYNGGKIVDCRTGETLVEKTLDPALVPELCDFAAAQDIAILTYNREGIVCERDKDEWANKECFTTKLPMIHVDDLASYVNYPVCKMLITLDPARRDAVCAAGQQQFAGRADLYPSSPFFIEAVPLGVAKDGSLAELLRRMGLTRENLMACGDGLNDRSMIAYAGVGVAMQNAEQPVKDCADYVTTADNNHDGVAEAVEKFILREDMRAKQVKSACNARRRGTFCTEPPRKGCKQGAFHCTIERASMKNAKISRRSFLKAGAVASAVGMLSAAPVAVHAAEADASAAADEENGLLDVFKKPKYVFLFIGDGMGTAQIQSARFYKGTVDNNGAVTEADLSFTSFPQVGSVTTYDSTSFCPDSASTATSIATGHKTESGVINMCPWTRDVPYETIAEKLHAQKGYKVGVISTVNIDHATPAAFYAHQKTRKNYYQIGVELANSGFEYFAGGEFQKVNGDGTGPDNHTVAANAGYNVVTTQAGAAALTAGAGKTLIIAENLGDGKAMNYAMDAANGEWQLTDYVKKGIELLNNKKGFFLMTESGKIDWACHANDAAASIHDVLEMSNAVQAAVDFYNAHPNETLILVTADHETGGMAIGYKTTNYDTFLTNLAHQKMSYAKFDSTYVQGYIANKTPFETAMQDVKNVFGLTLPTDPAAASAGKLLLTDYEVENLRKAYERTLQVGSSSQSKMSQQDYELYGTYIPFSMAVCHTINHKSGMDHTTYAHTGAMVNVYAMGVGAEKFGGVYDNTEIYHKLAELTKVQMEEKKSGIKKFFEEFKAFAMRGNVLDMAVGVVIGGAFTAIVTALVEDIINPLIGLFFKADFSDVVIGLGGSSIKIGEFVNSIINFLIVAFVLFVVIKFVNSLHKKPEEPAEPEEPTTKVCPYCQSEISIKAVRCPHCTSKLEGFPEMKAMKAKRWISLLLAVSMMLGVLAMPASAAAQQPESTAVVSEALPDAAELTAAEDENDIVNIRIRATGNLVYGSDYKLEVETRPENTQYIAVVLGTSGEAYGYVTLMISDKLRTLLKLIPLPKKMSQTPDQAEEFNVYSYLKQLIDGNDVGVLLRVADEVVSVMDTVSFFVPAGYLTTVKNVSNGMKLALSLIRKYLPEGALSRIYLDEQPKDSGKYFAGAIALESSDINAAGFAMFKIKPKTENVSLSWTADAPASMTVSQLQSADLTAKVISDGQVAENGKVSYTYKKKTFLWFSSKMSGVPTEPGTYTQTAKAGGNYSCSTISRTITVTADPQPAAAEQPAAMKELQYPVRPGRYRHFKGNEYQVLGVARHSETEEEMVVYRALYGEGGLWVRPAAMWLETVTRDGVTQPRFTYIGEMSKVIGIDLGTTNSCVAVVEGGKPVVITNAEGERTTPSVVAFTKDGERLVGGAAKRQIATNSGRTISSIKRYMGSDYRAHIDGKDLAPQEISAMILAKIRRDAESYLGEPVTEAVITVPAYFDDSQRKATQDAGRIAGLNVLRIINEPTAAAVAYGLDNEAAQKILVYDLGGGTFDVSIIEIEDGTFTVLATGGDTHLGGDDFDQRIVEYAVAEFKKSDRIDLTRDPAAMGRLKEEAEKAKKELSSAPSAQLNLPFIAVGKDGPHHLDIALSRPQFEMMTGDLLSRTVPPVQNALRDAGISASQLGKVLLVGGSTRMPAVERQVRELLGKEPSHSLNPDECVAMGAAVQGALLQGGGKLAGATGAAAQGLVLMDVTPLTLSIETLGGVATPLITRNSMIPTRKSQIFTTARPMQTSVEINVLQGERHFARDNKSLGKFKLNGIRASFSSKPQIEVTFDIDVNGVVKVSAKDLATGREQNITITGSTNLSENEIQRAMADAAAYEAEDSRRKERLDLHNQAEVLAYKVDEALSKCKKELDKDEKARVKVDLANLRRCLRKDKPEKMNETEEAALRQAKSQLEASANHLMLLYSAEQTPGDGTDSTLMVNTMARRTDGGVRFRPVGSRRSRTAPVYSPRGTGCPAIEQAVQGLYKGQNEESFWSLMSALNYALELETHVLVPLQTALSAQGAPAPWIEHPIPAEKADGLALWTLRNDKGRCWLPLFTSVAAAGADRSTGSRPMADRTLEQAMQLALDTPGIDGVVLDPWSNSASLDGALLNGLLHAGHTPEGPGAEEAEAGKEAARAGHWAAAAECYQKAAEQGSSAGLSLLGECLYQGRGVPKSAAQARKLWKAAAESGEPIALLNLGDDCAARGDNGKALLWYRRARQNAAAVPDIEYTPRVCLRLAQYETRYTSRKKALAQAAEAKQAFTILQREHEPDADRWLQEAEQLLYALTHEPPTAPAAYNIESLQLDMNRMLGYLKGYERESVLAPLFKMLEATFDLFVPLVMADIVNVGIAAHDLHYILVRCGLLLLLAFIGLTCSLTAQYFSAKAAVGYSTALRHALFAHIQRLSFSEMDTLGTSTLITRMTSDVNQVQSGLNLFLRLFLRSPFVVLGAMVMAFTVNARAAMIFVVTIPLLSVVVFGVMVITRPLYKTVQTRLDRVLGLTRENLTGVRVVRAFDKEQSEIDRFEDANALLTGMQLHVGHLSALMNPLTYVLINLAIVALLYVGSIEINVGGMASGDVIALVNYMNQILVELVKLANLIVQISKALACAGRVQAVLDTKPGMTFPAKLLGEVPADKTGDAVRFDHVGLTYAGAGAPSLTDISFTAKKGQTIGVIGGTGSGKSSLVNLIPRFYDATEGSVEIFGRPVASYPRDALRGRVAVVMQKAQLFGGTIRSNLLWGNKDATDADLWAALETAQAADFVRAKPLGLDEPVEQGGRNLSGGQKQRLTIARALVGKPDILILDDSASALDYATDAALRKALAALPGALTVFIVSQRAASLQHADQILVLDDGHLVGIGTHSALRSSCPVYEEIYESQFKKGEAEAMSAKAKNKLTPQQRKATLNRVLHKIRPYSAFVVCSLLVAAVSVAAQLYIPILCGDAIDKMLGKGNVDLAGVLRIAVSILVVAAVAALAQWLLSVCNNRITFSVSRDLRNEALRKIQTLPLSYLDSHPSGDIVSRMVADVDTFADGLLMGFTQLFSGILTILGTLLFMLRENVPITLVVVCITPLSLVVAGFLAKRSYGYFQSQSTVRGKQTALVNEMIEGQKVVQAFGHEAESLAAFDEVNGQLQDVSLKAIFFSSLTNPATRFVNNIVYAGVGLVGALYAVRGGITIGQLSVFLSYANQYTKPFNEISGVVTELQNALACAARVFELLDAEDQVPEAENAAALQPDGHVQLQNVSFRYLPDRPLIEGLSLDVQPGQRIAIVGPTGCGKTTLINLLMRFYDVNNGSIRVSGTDIRDVTRASLRGSYGMVLQDTWLRAGTVRENIAYGKPDATMDEVIAAAKAAHAHSFIRRLPKGYDTVIAEDGGNISQGQKQLLCIARVMLCLPPMLILDEATSSIDTRTEVRIQKAFARMMQGRTSFIVAHRLSTIREADVILVMKDGHIVEQGNHDQLLAQGGFYAKLYNSQFEGVQTMKIGFWELIVIVIVAFVFIGPDQLPVYAKKIGKMLRELKKYTGAASEEIQKNVVEPLNEIQAPLKEAVAPLTDIKKDIDSSMRDVTKSFTGIGKTSKEEAAKKQAETEEVTDLTEDAVEELPEQPAEAPAETVEAPAEKPEQAAAEAAQPAAEPVAEPVQEAPAAAEEAAEAAPAEEAKVMRIGTNELLIILVVVLLIFGPKNLPKLGKMFGKTINGFKKGMEDEDAEQSEETVKKADKKDEDEEMATNKKRKKKAEVMAEDGSMTLTGHLKELRNRLIICAVVFVVGVVVSLAYADRLIDLLTAMGRDYYQFVSIAPQEKLMQYFRVSILAGVVVTVPVAFYNIYAFAKPGLKKSESTFFKLVMLLGLILFCVGVLFAYKLMMPFMLRFLSTGIEGAEYIQTTTSIESYVNLCLTMFIIFGCVFEMPLITIILSKMGIINPQILKQVRGVAIVVIFFIAAVVTPPDIVSQCMVAFPMVLLYFVSIFLSGIFYKPRDTDEDDEEEEASEDMSFTETLQSITGKLLADCTDQELYLALLELVRQKSADRVQPVTGRKLYYISAEFLIGKLLSNNLINLGLYDEARSALAAAGKRLSDIEEVEPEPSLGNGGLGRLAACFLDSLATLNLPGDGVGLRYHFGLFHQSFEDGVQNEKPDPWLTAHSWAEKTDTTYPVELAGKEYTARLYKLAVTGYEGRTNTLNLFDLDTIDESIVHDGIAFDKTAIDKNLTLFLYPDDSDEAGRRLRVYQQYLMVSAGAQLILAECAARGCNFHDLADYAAIQINDTHPSMVIPELIRLLGERGIEFEEAVEIVTKTCAYTNHTILAEALEKWPRSYLDAVVPQLMPIIEKLDALARTRTEDESLAIIDKDDRVHMAHMDIHFTHSTNGVAALHTEILKNSELHGFYELYPEKFNNKTNGITFRRWLLECDPRLTATLEKHIGSGFRKDAAELEKLLAFVDDDAVLSELTAVKKANKEALADWLLHTQKVRVNTDAVFDIQSKRLHEYKRQQLNLLYLIHQYYEIKAGHLPAAPMVSIFGAKAAPAYTIAKDIIHALLTLSKVIAADPEVSKWLQVVFVENYNVTAAEKLIPACDLSEQISLASKEASGTGNMKFMLNGALTLGTMDGANVEISQQVGEENIYIFGQTSDQVIHRYAVGDYDPAQWVEGDANIRRAISFLTGPEMLAAGHAENLTRLHDELIHKDWFQTLPDFNAYVVRKGQALSDYACDPTGWRRKCLVNIAKAGMFSSDRTIAEYDRDIWHLGKMQNQASLQETKQHGAVRFPFNLYPCTIPGDFQQVALHWHESMELVFVKQGMGLVQVGVVTYPAYRGDIFIFAPGTLHALRQAEGQRMEYENIIFEPELLGGAEDLCAEKYLLPLQSGRLSLPVRLTPNDLCYLQAAACLRELEDANRAKRPGYELLVKGALLRFLALLIAQGRQCLSTETADTQRLKTVLQWLSAHYAEPLRVADAAGVCSFSASHFMRWFRQMTGQSFIAFLNEYRLNTAAEALQTTDETVLTIASRCGFENLSYFNRAFKAHFGMTPRDYRKKMIQTTVEVGGMACSMCEAHINDTVRNAFPVDKVSSSHAKGKTVILSKEPLDENALRAAIEVTGYHVGTIHSAPYEKKGLFSFFKKMTELLNDFLTGSVAWGVLLTLAAFGLGVLINKVTGKTIFNPLLLGSIFVIIFLSVCNIPYGDYKTSAAPVSYLLLPATVALAIPLYEKLDLLKENAPAIIAGISVGTLVSLGSAFALALAMDLTQEQYATLLPKSVTTAISMDVAAELGGIAALTGAIVIVTGIVGALLAETVCKLFHITDPIAKGVGIGTAAHAVGTSKALQMGDVEGAMSGLSIAVAGVLTAVLCPVFVGFVHMLHAVLPLPVPASVYGLVLLLAALTTGFVKLEQVKETGTYLTGIFPLLFVPAAAGIMELWAEMGQLLLPILIAILPVTVLVMAAAGRTTQALTARNKKEEADHDMFEQFRWDFRSPEERGDAGENIIYKALNKVHGRKALLPNCYIPVGQKGTTEIDMVFLHESGLYVIESKNYSGWIFGNEEQEHWTQCLRGKFHTTQKYPFYNPLRQNETHICALMELLKDDTVPYYSYVVFGNNCELKNIQLTSGKHHVTYALYLRRDIEYNARCTGTQLSDEKMDALYAILVNFTEVSGWQKDAHIRDVQAKQYPVVQADGTWTCPRCGGQLVMRVAQRGNHAGQTFWGCSNYPCCHFTYQEMIVSTKGRYALRVMIDLAEHQSEKYVPLKEVAARQEISEKYLENILKVLVQNGFLEGLRGKGGGYRLTRSPDQYTVSEILMLTEGSLAPVSCLTPGASACARMANCRTYEMWKGLNDLISDYFGKITLADLALPDQAGNDYVIMSKIYTAADQLIGHTPLLELSHIEKEEQLPAHVIAKLEYFNPAGSVKDRIAKKMIDDAETKGLLKEGSVIIEPTSGNTGIGLAAVAAAKGYRIIIVMPETMSVERRQLMKAYGAELVLSEGAKGMKGAIAKADELAKEIPNSFIPGQFVNPANPQAHIETTGPEIWEDTDGKVDIFVAGVGTGGTVTGVGKYLKSKNPDVKVVAVEPASSPVLSKGTAGAHKIQGIGAGFVPDVLDTTVYDEIIAVENDDAFATGRLIGHKEGVLVGISSGAAVWAAIQLAKRPENAGKNIVVLLPDTGDRYLSTPLFAEMLYYAAPMEGFTDRVWRQTHQKWFGTQGAADRYYAPFISPPENRVLIKKKMAELAPAANPGAPVIPQLLAKDGELAAWMIGQLRALGYTEVNLNLGCPAGTVTAKGKGSGMLRDPAKVDAFLDGVFSRAEGPVSVKTRLGVEKPEEFAAILEIYNRYPISELTIHPRVMRQQYRGQADRAAFAAALPRCTMPVCYNGDVTTAAQLHALEEEFPALSGIMVGRGLIADPALFRRARGGAPAAKEELRGYLTDLYHGYTELFGSAGCAISRMKGHWFYLIHCFAGAEKLEKQLKKLREPWEYEVVVNQIFTLPLVENNMGDATAIFSIHDKKDYEIHEIVQQVYDALKEKGYNPVNQLVGYILSEDPTYITTYKNARAMIRKVDRDDLLQAMLRSYLNVMLYGIGCDLCSLSHLEKSLSSAHAAAFVRRVYGPTEQAALGLLEGSAAPLNAHRLASAAADFAAKEAFLKAAGTGLREPFSLCEIEAVRQENGAPAYRFSGQTAAWVAQHRLRARLSLSHEGGMALAFCTLEEENMEVHRGEVFYADLSPVVGSEQGGVRPVLIVQNEIGNRHSPTVIAAAITSRLDKTRLPTHINIRAADTGLAKDSVVLLEQIRTLDKHRLRERAGQITAADQKRVDQALDVSLGLSSYMGMTLKELLTKGEGTLSAQEAKALAAQCRMDVDTLYTLLEERGIKVLEEENEPSLDVDSIIAEVENAENNNDDMGLADENEEDAEENPADLKAAMDELLDDPVKNYLKQIGQIPLLSAEQEVELSRRIHAGAEAAHILQADRQKYGAPEYIKKNSARFSFEEDENSRSYTEDLDEDGEKSAEDAEEKADEEKAMEAVENGPLSEERRQELLKTRRDGLNARRSLSEANLRLVVSIAKKHVGHNLAFLDLIQEGNIGLIKAAEKFDCDRGFRFSTYATWWIRQAITRAIADQARTIRIPVHMVETINRMRQATNQLVYQNGHEPTPEELAKAMDMSVERVREIQRMAQEPASLESPVGEEEDSSLGDFVADENAEAPGKAADRAMVAQQINLALKSLTPREEKVIRLRFGLDDGRPRTLEEVGRDFGVTRERVRQIEAKAIRKLHSRKCLTLLNGLIEMYEDEFELTFQVPEEESAPEPLAAPAAKPAAPVKPVVDEPTRVITLEKPAEPPAVELPEAPAPQPVKERPAPAAPAAARRVLISGGDRGIGAAAARAFAAAGYQVAVLYHQNAAAAAALEQQLPGCIAIQCDVASRASCELAFHAVEQAMGRVDVLVCNAGIAQQKLFTDITPEEWQRMLDVNLSGAFHLCQLALPGMIRRKQGRILTVSSMWGQTGGSCEVHYSAAKAGLIGLTKALAKEEGPSGITVNCVAPGVIETDMMAAFTAEDKAALAEETPVGRLGTPEEVAKLLVFLAGEDAGYITGQVFGVNGGLVIMTDFELMGLALEEAAKAAALGEVPVGAVVARHGEVVATAHNTRETEKNALHHAELLAIDAACKALGGWRLWECELFVTLEPCPMCAGGIINSRLRRVVYGAADTKAGCCGSVTDLFALPFNHHPVVEKGLREAEAQQLLQAFFVSLREKRAGRPRWKPPVPENRGKMHKLNPRTAALLSAFGWAVGYLLAGKALAVLLPVPPGGAARFFRVCLLAPLAEEGVFRGAVQRRAQPLGRGQAILLQAVLFALQHGSVAAMVYALVCGLGLGWLADRTGHLWPGMLLHSANNLLVLAMGMIRILTDSACDILPAEAQQLGVTVIPLNVTLEDGTVLRDGIDMTPSEYYTHLAACRKLPTTSQPSPEQFERLYLDAAAAGDEVLGIFLSDALSGTGQCARLAADLANVDNVVFVNTENVCLGQSLLVRLAVQLRDAGKTITQIAADLEKAKQHLHLVAAVDDLKYLRKGGRLSAAAAVAGGMLGIKPILAVMEGKVALAGKARGLPGVYVALFKKIDEMGGIHPGYTPLLGYTVNHRELQPLLTYLQDNLHLDAPLVRQIGCVIGTHTGPGAFGIAFFDKELALEMGITISPWMMAFLMLMTGFAGFVDSAAGGGGLISLPAYLFAGLPPHYTYATNKFSAACGTTFATASFFKSGAMNVKVGVLAAIGSFAGSALGAHIVLLLSDEMLRTMMFIILPVAAVIILWQRNLPDENRDDGTLDLKKILLALAIGFGIGLYDGVMGPGTGTFAIIAFTTLMGFDLRTANGNGKVLNLASNYASLFTYLMNGLVVFHIGIPCAVSNILGNLLGSHFALKKGARFIRPMMLVVLVLLLGKLISDAVLMKVWDLHCDTLYELRRAEKAGAPKSFLHNDLHIDLEKLRQGDYLLQCFAAYVDLADPAPGADPLVSVLEEIDIFKRLMAAYPEKIAPVYTAADLERNRAEGKFSAMLTVEEGGCCKGSLGVLRRLQELGVRMMTLTWNYPNELAAPNANPGGPLVANTETGLTEQGFAFLEEMEKLHITADVSHLSDKGFWDIANHSTRPFAASHSNCRALSPHNRNLTDEMIHALAEKGGIAGLNYCASFVDADSAHPKLCRSTVERLAKHAAHFKQVGGIEVISLGSDFDGIGGQHELETAADMPLLAEALRREGFTEDEVEAIYWRNAYRFFKNNLMDAQEIRTLLGKSIFERAQKYRKRILQSSCTTNEDGVRHLTALVQGSGPDCYYTQVWLRENGSFVSASCDCPYNQNGDGTYCKHIGALLLQDAEKNPPAPEKKPESIPGVQRGVAGLSTEPRKDSYSAGLDMLFGRKWRGEEPETDYEAQLLLKRYQREDAQPQPQNAAQRTGFALLEPELTPHNGRIWLRLRVSDGIGRRQYLVKSIPQFLDAIERGESVSYGKSLAFVHRWDAFAPDAQQLLRLLRRQVSARQAFEAEGTVRSGWEKGPAGGLPLTGEGLDALVELYAAEGVVGGYTLKEGLPVISLKVERRKGGVQLSCTPALSGVQGLDYAYLLGESTLWRMQREECRRVLPVLDTFGGRSLFFTSADAAAFCSYVLPELGNRVNIVDPDRLLLNQIPLEPVVQFYLDADRGLTVTAYPVFLYGEDRVAPGEPVPPDLLRDARTENRAKRLLETYLEPETGKPGHYSISGEEALFQLLEEGIPALLAMGEVYQTDAFRNLQAAPPKISVGVSVHGSVLDLEVDTGAFPVEELRELLQSLHQKKRYHRLRDGSLLRLDDSLEGLDELNDTLELSGAKLKDGHAALPLYRAPMLDWALSGQNGLRFDRDDAFRRISRSFHAVRDSEYTPPLSLQKTLRKYQRDGYRWLRTLDGYGMGGILADDMGLGKTVQVLSYLLAMKEGGQQLPSLIVCPASLVLNWQEECQKFTPQLQSVAMDGDAAHRAALVDGWAQADLVITSYDLLRRDEKLYAGQSFYACILDEAQAIKNHTTQKYKAVCRVDSRVRFALTGTPVENRLGELWSIFSFLMPGYLPPYKTFCARFEKPIVQDEDANAVRRLNQFTGPFILRRMKSEVLRELPPKTENVRRVELETEQRKLYLAAVVDAREKLRAAKPEDKMTVFAVLMRLREICCDPRLVADNWTGSSAKLEACLELVTEAVAGGHRILLFSQFTSMLELLAKRLDEAGVSHFTLQGSTPKPVRAEQVRRFNQGEADVFLISLRAGGTGLNLTAADIVIHYDPWWNLAAQNQATDRAYRIGQRNPVQVYRLIAQDTIEEKIVELQQAKQSLADTVTGGADGAILSMNPEQLLQLLGEEAMRMFPQETGTANAVSLYDPSCEKAISKRPQAFRNCKSKMDAIAHTQVSAVCLVTLAVLLRAQQKMRDKSLPGRLFTALLWSAGALTIVDHGSALAQLGAWQDLGIPLTYRLNAGGSILFYLLAACCCQLVFLYVEAELGHTWMEDGRRLALSAAPVTLLLLVLLTARDENGFCYLDAEGLRGSALFWGAKLVGLAYLAAAFLRCSWTLSNWKQETPKEELKTLLLLALAPAAGFLLQGWLPGRGLLCCGITLGLVCVYVLVLQTKFTVDTLTGVSNRIVALRYLESELPYYRRHPNRSLHFLMMDMDHFKHINDEYGHLEGDAALVLLAGILKKVCANYNGVLARYGGDEFCIACGCNSVEVRTLIASIQRELDAANAASGKPYQIEISIGCARLEPDIATVHDLIDKADQEMYHLKTRKRGVSMQIHQSAEDYLETILMLSQRMGKVRSIDVVNELGFTKASVSIAMKKLRENGYIAVDGEGNLTLLEPGLEIAQRIYSRHQLLTHFFVQLGVDEQTAAEDACKAEHILSEQTLEKIRESALRNDAAHPQAKMEYRLTTPCTAQELAPLKAGDTVLLSGVVYTARDQAHKRMMEALDKGETLPFDLEGSAIYYVGPTPERPGEVIGSAGPTTSGRMDAMSPRLLDLGNKIMIGKGKRDAAVKAAVVRNGAVYLAALGGAGALMAKSVQTLEVIAWPDLGCEAVRRLTVQDMPLTVVLDAHGGDLYEEGPAAYLAALMRTISAQSITDTVARLCIKANTQLPQDVQAALEKAREEEPWPLAKNTLDLLWSNLGAAKEKDLPICQDTGMACVFVELGTDVHIDGSFEAAIHEGVRRGYTDGYLRKSIVADPLRRGNTGDNTPAAITVHLVDGEGCRITVAPKGFGSENMSRIQMLKPADGVEGFKKFVVDTVKLAGSNPCPPIVLGVGVGGSFDKVAYLAKKALLRPLDIPNPDPYYAQLEQELLAAINALGIGPQGFGGKTTCLGLAIEQMPTHVAGLPVAVNVSCHVTRRASAELMLQNRWKYPGGSVTIKLYEPFPAGESLLLKLEDKTMDYNKAALEMHETHKGKVGIVSKVEVATRDDLSTAYTPGVAEPCRKIKENPEDVYKYTFKGNMVAVVSNGTAVLGLGDIGPEAGLPVMEGKAVLFKEFGGVDAFPICIDAHDAASVIAACKAIAPTFGGINLEDIKSPECFEIEETLERELDIPVFHDDQHGTAIVVTAALINALRVVNKKMEDVHIVLNGPGAAGTAIIKMLMTAGAKDIVAVDQFGTLYKGCNSAEAHKNWLGEVTNPRQIKGGLKEALEGADVFIGVSRPGILTTELCKTMNKDAIVFAMANPTPEIMPDEAKAGGVRVMATGRSDFPNQVNNVLCFPGLFKGALSVRARDINNEMKLAAAYAIADLITDADRSEENIIPGAFDPRVAEAVANAVAKAARETGVARLMKRITKILLCVLCAVAAVLCVAAACFMLLKKQSGTTANSAASGASVSTYGKVSDFDYASFDYSEGLDDNGHWTGIRALDYVTLPEDVSALPLSKADLEPTETEIQTQIDTLLNQYATTQNITDRAAQSGDTVNIDYSGAVDGVAFTGGTATGYDLTLGSHTFIDGFEDQIIGHNIGDTFDVTVTFPEGYGDSTDAEGNTITLSGKEAVFSVTLNAITQSVVPTLTDEWVEANFAASDDLHTADALRQYFDSALYANNLDNAAMDYLLTNSTFKEVPTQITSYYIRMFLNYHSQLATQYGMELDAYAQAKGYADADAMLADSDAYFEHLAKQDLVFQAIAEQLDITPTQEQIDSANSSYADTYGAQRSMLNALQLAVLDKVEESAVLSMNLPNKLTLTRIILVPVFMIFVSLTSLDSIVDGNFNATFYLLAGIVFAAASFTDYLDGHLARKWHMVTDFGKFADPLADKLLTTVAFIYMLRDGVCSPVVLCIILAREFAVSGLRMVAAGAKDGKVIAANMWGKVKTVLQMLSIIFYFFGTALSYRGTVDSVSIVVVVSIALCWMVAAVTAISGIKYLWDNRSFINTAKMKIACISLGCPKNQVDLDVMVHILLSAGHETVADLAEADVILVNTCGFIESAKTEAIENILEACAYKQQNPNLKVIVTGCLAERYRSQIEEEIPEVDAVVGCASNKAIDTIVERLFHGEDHLESYGAKKDFPLGGKRVIGTPAHYAYLKIAEGCNNRCHYCAIPGIRGPLHSRDMADCVAEARWLAGEGVKELIVVAQDPTAYGEDWGKPGSICELLDKLNKVPGLEWIRIMYAYPERITDEFIAAMKRNEKVVPYLDLPIQHCNDTILKNMNRRSTRAELLEVIGKLRREIPGITLRTTLIAGFPGETEEQFEDLCNFVKEVQFDRLGCFAYSAEENTVAAKMDGQIEQEVKDKRAELVMQIQTGIMAQKQAEKVGQTVHVLCDGIDEENGLYLCRTTGDAPEVDGCVCVSSEEPLYPGQFYDVLVEDSDLYDLYGTVVKMAFYRRRPRPDAEKCADPAKARASALETLAGQEVSANILYERLCRRYTEQAAAAAVAEMVQLDYVNDARYAEARAHSLLAARKSRRAAAQSLRQKGLAPAEVAGALEAVYAPEDGGDDPELEAAAALVDSRYRKKLAIGRRDLVVAALQRRGFAYPVIKEAIRRVEEGEMAKNQNNNVAPATQKTEPEAKKDALATALAQIEKQFGKGAVMKLGDNASMQVDAISTGSLGLDLALGVGGVPRGRIIEVYGPESSGKTTLALHILAEAQKKGGEVAFIDVEHALDPTYAEALGVDINNLLVSQPDTGEQAMEICEALVRSGAIDAIVVDSVAAMVPRAEIEGEMGDSHVGLQARLMSQAMRKLTSVIGKTNTVCVFINQLREKVGVMYGNPEVTTGGRALKYYASVRIDIRRVEGLKDSSGQFIGNHTRAKIVKNKVAPPFREAEFDIMFGEGISKMSELIDVGVKLGIVQKSGAWFNYGDIRLGQGRDNAKQFLKDNPEIANDIEGQIRANADKLYATRRPAGRAVAAAEKPADPAAAKEPVVKAPTRSSESELDIMVEDMVSEAMLPRAAVREVEQRLTAAGCPDADFDARELFRLATGRDVRLSDRPLTAEQAAALEVLCTRRAAREPLQYLCGSWSFLDFELAVGPGVLCPRADTEVVAQAAAETLAGIAAPRVLDLCAGTGCLGLGVKRFCPAAQVTCVEKSPEAFVYLEKNARCALTGQGRQTENVLEPSALEQEDAPTFDWGPALNALRASKKPAYAVQPVQADLFTYWETLPEGQLELIVSNPPYLTAAEMEQLQPEVAQEPAMALEAGEDGLVFYRALAQHYKNALCPDGALVLEIGWQQREAVTALLAENGWAEIRCIQDFGGNDRCVTARRPKMNQPKKERFKTSVGGQALMEGIMMRGPKQMCCAVRKPDGTIETKLDPTPTHGVWTKIPLVRGAIAMIESMIVGYRYMMYSAQVSMGDDYDPAEEETAFEKWVGEHLGEKAENALMTVAAVLGGLLAILLFTVLPTFLVGGVNRLLPLGRWGKVVLEAVLKVAIFLTYMVGISKMKEIHRVFEYHGAEHKTIACYEAGDPLTVENVRKYTRFHPRCGTSFLILVVIVSVFLYSVLPWGSIGLRVVCKLLLLPLVMGISYELLKWCGRSDNIATRIIRQPGIWVQHLTVFEPDDSMIEVAIAAITPVLPENPEEGKWMRSGITRRWLRGNLLITVLVVLLAEAMFLYSYTRSYYGSVQQIMYRRFSSVTGQLKMYTGDTAQSAAASRSLALRRMVEQFADKDKYEFMLLDSYGGVIASSSGTDAEGIVSSKDFEQALNGPDGLGVAVYRTQSGEVVMAACSLVPYDAEDVAALRLVTSLALVERQVKNAIIISVFLAVAILLFTIMSGLYFVRGIVVPLGQVERTAAGIARGELDVRLPLTGDPHDEVDRLRGTINQMAEGLEETEKMKNEFISSVSHELRTPLTSIRGWVETLMTLNDPTDENYRKGLEIINNETGRLNNMVEELLDFSRLQNGRIRMECRPLDLVAELTDAVLFCEARIRQEGLLLHYTEPEEMIPVYADPDRLRQVFINILDNAIKYSAPGGRITVKLWAGEYKAFVEIIDQGRGIPPEDLENVKTKFYKGSNSVRGSGIGLALVDSIMTALDGTLDIKSTLGRGTVVTLGLPLYHKAMVRVLVVEDEANIRDMIALNLRHAGMEVVEAESAEAALPLLAQKPGCDAAILDVMLPGMNGFSLCETIRRTDQQIGIIILSAKGQEQDKIRGLSIGADDYMTKPFSVSELLARVEALCRRVTRNKEEDSNGNTPLGTLTSGDFVLDENRRVLLKAGQPIELTQVEFQIMELFFRNPGTALVREKILKGVWGENYFGDVKIVDVNIRRLRMKVEDEPSHPTHIMTVWGYGYRWEEMNRTHRLRLVLCTLLCFVLCSCQTVLPANEKAQVEELLRAPKLSGDYGALQTALNDWLGESAQLKYPIQGELLSPFVLQDLDGDGQQDAAVLYTTAQTANVCVAILQRDDAGSWQVRQSVEGLAETVENVSLAQLQDTDSCQLVVGYTAAQNDHYLAVYSYQKGTLSTILEQQYEQYLVENITGGSSQDLILMSTQEDGSVQIELLTADREGSFRQVAVNGLSADKFSGCASVAAGAGADGRHYLVLDGWTGISGNNLASVLLCYDETSQQMVPATRISSQRLYNASLRNVPTLVSRDLDGDGIVEIPTQPDEAGLLNLSQSRRMDFIVWMDYTSSQPEKSFGLLDEETNCYIELPAEWEGNLKLTDSEEFDGAVELRTVDEDQLVLTVRLASTSANSTGWTRLGVVASRQVQAKMGPGVLLSDTNYRLSKALYLLNMPGTRKLGRTSDSRNAMMRAMVTYLLENGKIETTVTRAKDVRSMAEKMISLGKASDLHTKRQVYAYITKEDVAKKLFDEISPKYADRNGGYTRIIKIGARRGDAAEMAVLELVMMEIERPKIETASLSPDGRYGKFVAEPLERGFGITLGNSLRRVLLSSLPGVAVTSVKIDGVVHEFSTIEGVKEDVTEIVLNLKGIAAKLYTDGPKTVRVEAVGPCEVTADNIKQGDDIEILNPEWHIATLGEGAKLVMELTFDKGRGYVPAERNKQAIIEKNDINTLPVDSIYTPVLKVNYNVESTRVGQAIDYDKLTIEVWTDGTINAQEAVSLAARVLTEHLNLFVNLSDEAAGAEIMVEKTNDDKEKALEMTIEELDLSVRSFNCLKRAGINTVEDLVSKSEDEMMKVRNLGRKSLEEVMAKLDSLGFKLNTDDEMAKNTQPIAKRCKALGISPAVMGYAKKNTTRNSNGNVRKKQSEYASQLKEKQKVKFIYGVLEKQFHNAYLKAEARPGKTGENLLQIMECRLDNVVFRLGFAQTRRDARQLVSHAHFTVNGKKVNIPSYQVKAGDVIEVRESSRSSAKFAKLTGAEAPVVALPAWLNRETGSLKGVVAKLPERSDIDYEVAEHLIVELYSKMASANNAKKGANVRMKRKERKNIAAGQAHIQSTFNNTVVTITDLQGNAVSWCSSGSLNFRGSRKSTPFAAQSAAETAAKTAIEHGMKTVEVYVKGPGAGRESAIRALQATGLEVTLIKDVTPIPHNGCRPPKRRRVMARIAGVDLPREKRVQVGLTYVYGIGQTTANKILEATGINPDTRVKDLTLDEEAKIRDYIDQANILVEGDLRRNVALDIKRLVEIQSFRGTRHRKNLPCRGQRTKTNARTCKGPKRTVANKKKMKVKPSVKPICEKCKVIRRKGRVMVICQNPKHKQRQGMSKEDVIEIEGIVREAMPNAIFKVEMLSEDKNTGKLTPSGHILLAHISGKLRTNFIRILPGDKVTVEMSPYDLSKGRITWRSKMKALEKRSGKLHKNGRRHGRMQCFLFLEREHRCSIMTNMAVEARYFLDGQAQSARFADFVPQEMKYVALIATCPSGNRRESSMIQIKNAKELDGMRRANALSAAALKYGGEHIEAGMTTWELDKLIYDFIVKHGGIPNFKGLYGFPSTACISLNDTVIHGIPSHDIVIRPGDIVSIDTGAKVDGFNGDNACTYAVGKVDLEAQRLLEVTKASLYKGIEQAVAGNRIGDIGYAVQSYCEDAGFSVVRDFVGHGTGKELHEDPEVPNYGHQGRGPRLVPGMTIAIEPMICQGDYKIKQLRDGWTVKTKDGGLAAHFEHSIAILKDRTEIMTRSWDDPDFDPATFSLKMNLILLGAPGAGKGTQAEIICAKLNIPSISTGNILRAAVKEGTEMGLKAKSFMDAGALVPDEVIIGILKERLAQADCANGFILDGVPRTIAQAEAIETMGIRIDKVLELQVEDSVIVERMSGRRVCEKCGASYHILNKKSKVEGVCDLCGGKTVIRKDDQPATVLDRLKAYHEQTEPLVEFYRTRGKLAEIKFCPSIEETTAEVMKALEAMFQTFRNAWKIPELKNRLLFTLAILVVYRLGCAIPVPFVSGSALTQMFANGDMLSYLNMMSGGALARCTLFALGVTPYINASIIVQLLTVAIPALENLAKEADGQQKLQQINRYAGAVVALIMSIGYYFVIRNMGALKYVSGAAGVFAAVVIIATFVAGAQLITWAGEQIDDKGIGNGVSLLIFASIVSNWSSLYTSVTGLLTRAAAGEPQFYILLPVLVILALVAVVFVVVMTNAERRITIQYAKRVVGRKQMGGQNSYLPLKLNMSGVMPIIFASALVSIPGTIGSFLQIDQTAHPVWYAFFHTFNYTSWLYVVIYLLLILAFNYFYVAIQYNPVEIANNLRRNNGSIPGFRPGKPTSDFITRTLNKITLIGAIFLAAVAVLPIILGNLTGMSIQLGGTSLLIVVGVALDTTRSLDSFMTMRNHKGFLGMKLHELHASKGANKPVTRKGRGIGSGNGKTAGFGSKGQKARSGVKHAGFEGGQMPLARRLPKVGFNNIFATQYAIVNVADLEAAFNAGDVVDTEALKAKGLVKKTLDGVKVLGNGELTKALTVKAAAYSASAKEKIEKAGGKAEVMMADKMLKIELKKSLIGRGAKQIATAEALGLKKPGDVTVQPDNAATQGKIAKIGFLLSVTEAMAMRNREDDGMITKVVSINRVSKTVKGGRIMKFAALVVVGDGKGTIGYGIGKSGEVPEAIRKGEAAAKKNMHKVALKGTTIPHEIVGKYGAGAVLLKPAAPGTGMIAGGPVRAVIEAAGIKDVRAKSMRSNNPINVVAATFAGLCGLVSAESVAEKRGKTVKEILGMVKQIDKNEARLRRHRRVRNKISGTAARPRLDVFRSAKHIYAQIIDDEQGVTLVSASTMDKDFNGNGGNVEAAAEIGKKVAAKALEKGITEVVFDRGGYVYHGRVKALADGAREGGLKLMSRIGRKPIVIPAGVTVTVDEAAHTVAVKGPKGSLNSNYHPLMTVKVEGNEVLVTRPNDEPKARSLHGLTRTNIANMVNGVVNGYEKKLEIVGVGMRCQKQGSNLVMNLGFSHQVNIPDTEDCTIVWQDPNHFSVTGIDKQKVGQYAAEIRGKKPPEPYKGKGIRYAGEVVKHKEGKAGKGKKMQITDPIADLLTRIRNASTAKHPSVEIPASNMKKAICQILVDEGYIKGMQVKNDTVQGTIVVTLKYQANGEPVIAGLRRVSKPGLRIYTNCEDMPKVMKGLGIAIISTSKGIMTDKAARAEHVGGEVLAYVWMSDIRPGANNLFRGGIIIKQMRANLRRLVANADYMAKLSMKLKQSRPAKFSTRAYTRCRICGRPHSVLRKYGVCRVCFRELAYKGEIPGVKKASWMARLKEQYVNEIAPALNSKFGYKSVMQIPKLDKVVINVACGEAKENEKILEAVMKDLGQITGQKAVVCRAKKSVANFKLRQGTPIGCKVTLRGERMYEFVDRFFNVALPRVRDFRGINGNGFDGRGNFACGIKEQIIFPEIEFEKVDAVRGMDVCFVTTAKTDEEGKELLKALGAPFAENNMNNLHVKTGDNVMIISGKDKGHTGKVLQVSPAEGKVIVEGQNMVTKHVKPRRQGEQGGIVKAEGAMYASKVMPVCPKCGKAVRVGHVEKDGKMVRVCKKCGAELMVQMQTYLKVADNTGAKELMCFRVLGGTRKRYANIGDVVVCSVKKAAPGGSVKKGDVVKAVIVRSKHGVRRDDGSYIRFDENAAVIVMADKNPKGTRIFGPVARELRDAGYTKILSLAPESLMEERNLRKTRVGVVVSDKMDKTIVVAVKDSVQHPLYKKILKRTVKFKARDEQNECGIGDRVEIMECRPLSKDVRWRLVRIVEKAKMKANELREMQTAELTSKLADLKAELFNLRFQHAINQLENPGRIEAVKKDIARVMTVLAEKQMLLPKRVKYRRVQRGRMTGKATRGNVVCQGQYGLVALEPAWISSKQIEAARVAMTRYIKRGGKVWIKIFPDKPVTEKPAETRMGSGKGSPEYWVAVVKPGRVMFELADVDEATAREALRLAMHKLPIKCKFVVREDSVKEDGTNEGMGQKVNPHGIRVGVIKDWDSRWFASKKDFSDNLVEDHKIRTELKAQLKDAGVPKIEIERTVDPSTSAPRVNVNIYCAKPGMVIGKGGEERIALQNKLTKEYGKTVIVNVIEVKSPSTNAQLVAEDIARQLENRVTFRRAMKQCMRNAMSPRDRATVPAKGIKAMCSGRLGGADIARTESYHEGTIPLQTLRADIDYGFAEAATTYGRIGVKVWIYKGEVLKSAKTAPKKEGGNKMEARAILRYARISPRKVSIVMDLIRNKPLDEALAILQYTPKAACEPLLKLVKSAAANAENNFNMDKNNLYVAECYVCPGPTLKRMMPRAQGRGYRILKRTSHMTVVLKEKEMGRSIKKGPFVQAALMKHVEAMNASGKKQVIKTWSRASTIFPEFVGHTFAVHDGRKHVPVYVTEDMVGHKLGEFVPTRTFKGHTGNSKMAIKKYGPTTPGRRGMTVTDYSVLSKVAPERSLLEPMKKHSGRNNTGRITVRHQGGGNRTKYRVIDFKRQKTDVPATVKTLEYDPNRSAFIALVEYTDGTKSYIIAPDGLKVGDVVVSSKSADIKPGNCLPFENIPVGTIIHNIELYPGRGAQLVRSAGNMAQLMAKENGYALVRLPSGEMRNVPVNCTAVIGQVSNIDHENVNLGKAGRKRHMGVRPGSRGTVMNPCDHPHGGGEGRAPVGHSGPMTPWGKPALGLKTRKHHKRSDKLIVKRAGKMKTAHDIVLKPVITENSMAGIADKKYTFKVATDATKVEIAQAVEVLFPGVKVAKVNTVSVRGRFRRQGMHAGYTAASKKAIVTLTKDSKEIEFFNSMVMAKFNVVDMNGQHVSEIELSDAVFGITPNEKAVHIAVVNFLANQRQGTQNTKIRMEVSGGGKKPWRQKGTGHARQGSIRAPQWTHGGVALGPKPRSYNYHINNKVKRLALLSVLSDKAANGNMVIVDKFACDEYKTKAVVAMLNAVGAGKKNLLVNETVDAKFVKSTGNIAGVKTTFAGSVNTYDVLNADKLIISVDAAKKLEEVLGMVKGIIGKKVGMTQLFDESGKVIPVTVIEAGPCTVVQKKTVESDGYQAVQLGFGEVSAKKVNKAAAGHFKKANVAPKKTLREFRLDDVSAMNVGDILKADVFAAGDKVDVAGVSKGKGYQGVIKRFGQHRLRESHGTGPVARHAGSMGAISNPSRVFPGKRLPGHMGCVRVTVQNLTVVKVDTENNLIAVKGAVPGSKGTIITLANSVKAMAVKEKIRIRLQSYDAQLIDAAAEKIVETAKRTGARVSGPIPLPTDREVVTVLRATHKYKDSREQFESRTHKRLIDILKPSNKTVEALMSLQLPAGVDIEIKLMALDAATLALTAAELKATLTDAKIAKIFEPTRDELVITLRTRTDTYALLLSARSGSARVCLTEETFENPETPPSFCMLMRKHLTGGRLLDVHMEPGDRIVYFDFQCTNEMGDLVRNTLCAELMGRYSNLVLVQSGKIIDALKRVDFEDSDVRQLLPGLPYTTPPKPARPDFLLVSSASIVAAACQRELPVADALNKTVAGVGPVVCREAAWRAFDGEHLPANELTDAQKRSLMAAIDELKELHTQGGCPCSVTAPDGKPVEYTFFRPQQYGEQYTIREWPSFNAMLEGYYAEKDRAERLRTKSKELHKAVHNMYDRALRKQAARQEELAASGKSEKLRLYGELLSANLYLAQKGMKSLTVPNWYDEGKEVTIPLDLRFSPSQNAQNFFKNYKKKQTAARMLVDLLAEGEKEIAYLETVLYEVESASGEAALNEIRMELKNQGYLKYYKQRDKKQKPADFLRYTSSDGFEILVGRNNAQNDKLTLHTARGKDLWFHVQKAPGSHVVVMSRGEDIPDTTKQEAAELAVIHSSAYKAGTGAKVAVDTTEVKNIWKANGAKPGMVLYEVYTTVYITPREGLEEQLKKKMTTVQQVYEVMQRLAPPELAEHWDNPGLLVDCGGNVRRVLVTLDITPEVVEEAAAKQCTIIVAHHPVIFDPLKRLCPADVPYQLVQAGISAICMHTNLDAAEGGVNDVLADLFGIRQRAAFADGCGRVGKIDPITVPELAALAQRKLAALCNAPDTGTAVQVKFADTGKPVHRLAVISGAGGSLFAEAIAEDADCLLTGEANHHHALDAKRLGLSLIAAGHYATEFPVTAAVAAALRTALPELEVLVSTENRDPYTYLMLPTLDARLTAAAELVRPGQPVADIGCDHGKLTAVLAASGKYPKVIGADLRPGPLAKAKQTLENAGCLDRAELRLGDGLSVLSAGEVGSIVLAGVSAQTTWEIIEKAPWVSAVGGPRLIMVPATRHSELRRWLWQHGFALVADRPVQAAGRWYAVMAAEYTGKVTEPTFTQCLLGDTGRWPEGAGYAAWQRAKLPRMRLGVPDGSPLAAEMDAILKEGNMFDIFNMLKKEAHTAPKQVTRDTIIGDILDMDQTTAPYFMEIGMHCLGCPASRGETIEEACEVHGVNCDELLEKLNTHLAAKKAMTQLTRKQQQLFNALSIVVGNAMYALTVVLFLMPSGLITGGATGIALAFNKVTGLPVSAVLFVVNVAMLLLGWWVLGRRFALNTMASTVLSPFFMALWERLLGNLVLTDDLVLNTVFAGFGIGISLGITIRAGASTGGMDIPPLVLNKWFHLPVSSTMMVFDFIILAAQAAFSPVRQSLYGVVMAIIYTVVLDKVLMLGTTRTEVKIISAKSDEICAAIFAQLDRGVTILHGEGGYLREPESVLLSVVSNRQLPRLEKLAHTIDPTCFMIVSHVTEVSGRGFSLEKNYQAEGMSSLFLMITITDRRSTDGFLQLYKSHGVTVSMRTVGSGTAVQETLSTLGLEKTEKAVLLAVVTAESWQKIQKDLRRKMQIDVPGTGIAFIVPLSSIGGKRALMFLTEHQPLTWKEESTLKDTRYELLLVVANQGYTGSIMDAARTAGAGGGTVIHAKGTGMEGAAAFLGVELVNEKELVLIVSRTSQKNTIMKAIMEGANPKAGTIVFSLPVTDTAGLRLMEEDEAQPEAALMDIILRRSLPKLREKLLEALQAVLPIVAIVLVLCFTVAPVSPSILLCFLLGAAMIVVGIMFFTLGAEMSMTPMGERVGAVITRSRKLPLILVLGFLLGFLITISEPDLQVLADQVPSIPSGTLILSVAAGVGLFLVFAFLRMLIGVALPKLLVLFYGLIFLLATFVPKEFLAVAFDSGGVTTGPMTVPFIMALGVGVSAIRSDRHAADDSFGLVAMCSIGPILAVLTLGIAFRAADSTYIPPVLPEVADSVELWQLFREGLPTYLAEIARSLLPIVLMFGAFQLIALRLDRRTLGRIGVGLVYTYIGLVLFLTGANVGFMPAGNYLGQVLTGGGMRWVIIPIGMLIGYFIVKAEPAVYVLNKQVEEVTDGAISAQAMGLALSAGVSISVGLAMVRVLTGISILWFLVPGYVFAISISFVVPKLFTAIAFDAGGVASGPMTATFLLPLAQGACVAVGGNIVTDAFGVVAMVAMTPLITVQMMGLVAQLRTRKARVAQPAAVLATVFADLPDDAIIELMAAACALAIFSGKIIYKFGIPERLRTLRYSIFTGKDIKVSNIFLQFMEYAQVFSFCGLTASPMENEKKTGDKYSKLAGNTLIFAISSFSSKLLTLIVQPFLTYAMAEISDLGLSKILSQYANLLIPFVSMGMSNAIIRFGLDKGNSEKQVFTNGLLTILGGFGILVLCWPVTQFLPDMAQYGLLIYIYVLMSCLRTLCTQFVRSRQWNKLVAVDGVLCTVATMAFYVLYLVGFKWGANGYLLAIISGDLTSVLFLLFTGKLWNYVELKGVNKKLWRQMLNFSLPMIPAQISFWIINASDLFFVREMCEGLDGRTGNAWSGLLSTGYFLPTILTTLGLIFYDAWQLSAVTEEEGRARFFTKIFRTYSSVLFCCAAGIIWLCRPVMHVMKSNYYYAWHFVPFLVLASTCSCFNQFMNSVYVVTKKSQRSMVTMMAGAISNCIMNYFFIKLWGPVGATYASFLGLALVFTLRAVDARRMIGMRVHPARVLANAAALVFEAFVLLAEPPLYGLWTGLITLVIILYNFAGVWAMARVLLPRLLGRRGKALVAAVDGWLKPKKAMPAKPCAQLRSVEGIQYELVRKKVKQLHLRVRSNGTVMVSIPLTASLEQADRFVLQNAQWIRDTRVKNITKLNKDNADLPDKATALAYFTAMSDKVYPAFAGVLGGQKPILKVRSMTSCWGVCCPAKRQITFALQLYNQPPAAQIYVVVHEYCHFLQLNHSPAFWAEVEKLLPDWKVRRELLKRMTNQTKNSMLLMLCALIWGTAFVAQSAGSGMGAFSFLAGRSWMAVLVLIPTVKAFDALRHRQGRPDGKPKTTAERKLLLKAGLVCGTLLFLASAAQQLGITLDPSTAKAGFLTAMYVVLVPVFGLFLGRKGSAQLWVSMAIAVVGLYLLCMKDGFGSIQSSDGLLLLCAVLFSFQIMAVDHFSPQMDGVRLSLVEFFVVSVESTVAALLFEQPAMAEFVTFAGPILYCGVMSSGVAYTLQILGQRDLNPAVASLIMCLESVFSALGGWLLLHQNLSFRESTGCVLLFAAVVLAQLPLGRLMRSKAMKMKKQLLALLLAAVMVLSLTGCKETLKKVAQKITGHSEEVQEEDTTRWAEATTDPLIIQGIADASAKYATATADGCLYAVFNGIWSRNTGYFTVPGGSVNIMACGTAEGTQKFKVALWKKVDGGAEYVPDSTYYIKTDGTDYRCTISGLDPAAQYRVTISYDSSRYYLYGLMKVEGIAGMKICAETGGKPHKINTGILCRAAKCGILTLYLPVGRDARKRKVSLFLMTQRRRTSKAKAKRRFGRRAFLTGAGVAACAAAGWYLRQKSDADHTAASGQDTPPAPNPALPAGEWRAVWVSYLDWALLDFSTEDTFRAGAAQLLDNCVGLGLNTVLAQVRPFGDALYRSSLFPWSHLCTGVQGKDPGFDPLDVFLTEAHRRGIGVEAWVNPYRLRSSAAMPPNLAENNLANTHPDWLCTAGEGLYLNPAVPAAADYVVQGVAELVQNYPVDGIHFDDYFYPTTDAAVDAAQFAASGAADLAAWRRQNVTALVAKVHRTVKAADPTLRFGISPQGNPDNDLDQQYSDVTAWLAAGGGEKVIDYLCPQVYWGYGFTLHSGSTRFAFENIVPAWLSYPRAGDVALYFGLGAYRVGTGDGGANPDSVSGWSTGSALAAQVKDLRQQAAGGWALYRYGSLFGPEAPALAEAECAALRALNTMKLKFTRKTWYFFLLAAAAVSMLGGFAVLGGMDFSGLEMIVFCLTGIAVLFLAAQKGAPAREKRNYTGVFVVLMLSKLGASGWAGDICSALVWPALLATEYERGKPIQRQLQLVSAAEVLRLVFWMLTKYAGMSGLAFWTNIMFVLLTCARGWAGLTLYKTQEETLMNAVVSVCLLACALGIIVYLLSRRETTRRSQYGPAGLSEFRTGLALDECFDRLDTRSDTDLFAYECRRENDGSFLLHLTLHQPSQQPLDTLYTLRLDPGRQTVVTLIFIREAFGYKEPLFPPAMLDEFMLQKLDAHRTKMASFELREPKKKPRYYKLIANVLVNGKIERRYGRFDFDPTELKNARARNAAAKAAAAEFERLEQEKADKEASNAGKTFAVVAQEYIASNRSRMAPSVRLKGDYDSNRNKENTSLKKEKYLQRIQCYPEFSEKPIALITKKDCDSMIRFIEDSDARVYKRAVLKPEAKEFKTVSCPKIAKECTIREETIERIFRGETVSLDSAQQVATALGKTVEQMFEVEIDRRPMTKKTMREYNLFIRSVLNYANDNYGTSLQMPMIKASGRKGKSVDCLHSDEVEALQAALQECSMLEKAIVLCLLNTGVRRGELAGLTWKDVNFREGTIHVSKSLLVFPNYGYQLTTTKESNIRDVDVAPEFMDFLKDYYAQWKAQKKLMGASWQKNLEKKGSKYAQSLLDLRGNDFVICNDYGFPINPDSYGALVRRVGKKAGIEKIHPHMFRHTFVSILLSNPNIGVATVAAEAGHAQPSTTLAIYTQVYDRRRDEIRKQMSRELYKMNEKVMVSPEIQTEAVVLPQIVSIKQASQRMGLPEYYIRRLCREVPGMAFQSGIKWYINLGKMADYFNGGTTTLMEPHIGSEQGGTRPVVVLQNDVGNRYAPTLIVATVTSRTEKKKYQPTHVLIAHNTAFEKPSVVQLEQIFTIDKSRIQRFLGQTTRHEMRRIEEALMNSLEINEWDRRNADEMKKMNCVSTMPEIMPEITDEAIIEALFAQRPYEEKVINSAFLEIPAEYQRKLNIPNVEKMSAEFTELIANPPKVSYRDGHYFVFDGQHTIVTRRAMNGGQDLPIICKVYEGLTEEEEAMLFSRQTGVSTPLTAGAELRAALVGKDPESLAFVKATESTGLQIGLDSYRAPWKIICIRTAFKEYKAYGADLYKEALTMLAKGWEGDPDSLRSGILQGMVRFVALYQGEYDPERLVKRLHTVHPMTLVNDEKSLSGTVSYKYMMLILRTYNGASRRFNLPIKQMNLNALKVDPEFQGKIPPLTFEELNQLEANILRDGRIINPIIVWEGLIVDGHNRFIIAKKHPEIPYTVHETEFANRYEAIIWICKNQLGRRNLTPEQKKYLIGKQYEAEKCSNGGDRKSAVAKSGCQIGNLIPTSKTCQKVAKENGVGMRTVFRAEEFAKGVDAAEEAVPGTRQKVLSGEVKPTAAEIASVARAPPEERLALVAEICKPKDQKKAAAVETTSSPAAKPLSDSSTSEEECTDEELVHTPAPQEQTFPQRVNESLKIDRQQILEIANSRYVPKRLADGTAMLCEVSGAANSMMRRWESVFREYPDILSDAENRASVERTIQKLRDYLKNLEDKMEELLMSRNFTHQPDESTLTTLCPRCLTAFRNARGIRVRRADPYQLTKEPCTYCQTNFGYDYYIQPTSPKATYFKKGRFDDESECAMYFDSYITGKRIQQLRKTKGLTQEQFAVKLNISDRHLGKIERGEGTASIDLLVEVAISLNTTLDFLILGVLDTPRERELNAQIKKQHQKIQIFKNKLSNLIDELDTSASVMDNILNTIIAYREERKWSLYDLATHAELKTSTISTWYNNNAIPTIPSLVKICDAFQITLSEFFAKAEGSESVPVALTPQQMQIIEKWSILRPDQQEAVLNLLNTIPMKVSADYRMLALDALRGKWKTAVLTGIAASALGATIVSSSNSIVSNSDQAKDIHFELFSQPNGGRLLAVLLAGIVLWAILQLIVGGAVQLGYARFNLNLVDRKDAAVSDLFSQKDRLWDGFCMKFLQGLYIALWSLLLVIPGIVKSYSYAMTPYIMSEHPSLTANEAITESRRIMDGNKWRLFCLDFSFIGWELLCSLPLYAGGFLVLKYFTGSEAMALSLVLLLTIPLSIGFFFVRPYEEAAWATFYRDITAAPTEPDEASMNSSTLLVILAVVVVCAVVFVLFSRSGKNKAAEKKADPAEANKYALVAQDILKGIGGKDNVVSASYCTTRLRFVVKNYNQVNEQAVKAAGASGIIRPGKNACQVIVGTKVKSVYDELDKLLKMERLANYQQMVDPTMVWGAIKSNDAVRMDVSFTWKKEEWLIPAVFPIPGGLVVDVARKLPYYHLKNRLTIYEKHRNAGFHSPLERLMMDQYDPFHFHPMGHLLTGNDCIDEWRSERFIWNPLRMSPIASKEHYSARKLVEHYGFDLNTGWVIFRLYFKSELLSVHDQELTLMLEAPDEPVPGPILKIEEAGQHIVFQNPLTKKAEMITVTVLENGVIEHPFKKQGPVKYPANYVILHYRFHPEKKEQQYCLMDTWLTDEPIELEPSVESEQPHPEEAQLHDPRFSKVTLRDYMAENRNRAAYSSLTHYPRLTTEWQFVAIHKERKNVRVKLKRDMHAVLLDFNGTMFFDTRFHMEAWSEIYHELHPEDPNPLDPKLICGPCNESIIQNMAPWLNADERKQCSERKEELYRRMCRRNPDSLHLVAGAEKLMQGLHERGIPFILASASIKANVDFYFDSFPIGKWLKKEDVVYDDGTYADKGEMHLEAARRLNVPFSECMVIEDSVAAITLAKRNGAGQIVAVGEKADGSDLIQLGAAHYIHDFTEFDYAWLENMASNATHYNNLTPAKPLDKATLNKMVFRSLNLQASFNYERMQAAGWLYCILPGLEKIHGDNKEDLKLSMEHNLEFFNTHPFLVTFVMGIILSLEQQKADIETIRAVRVAAMGPLGGIGDAIFWFTLVPITAGITSNMAINGSLAGPIMFLLIFNIVQFACRFFLMYWSYNLGTKAIDILTANAKEFTRAASMLGVFIVGALTSNYGGTTVATVIENGDSPIVIQSILDGVLPKLIPLALTLGLFFLMKKKNWKPVTCIALLLVIGLVGAFFGIFAMGFSALQIILVFVWVFIVAIDQFDFLESLYQPIVSGAVIGAILGDLPTGLIVGGTYQLMTIGNMPVGGAQPPNAVIGGVMATVFAISSHLDTTAAVGLAVPFALIGQYMVTFLFTLMSPMMSKADQLAAKGDTKGIVRLNYLAMALLGLLFAIVCTLGMLGGSAMGTTLSNLAAKYAWVMAGLGAAGGMMRFVGFATLLRIMLSNEFWGIYFAGFALATIIGYIPELSGSALLLIAFVGIAIALYDYQTRVAIKQAAGSGFAANGGDDEDGIMPNIVLTRIDNRLVHGQVATQWCGAIGANLILVANDEVAGNSLRQGLMNMAAPSYASMRYWTIQKTIDTIHKASAKQLIFIVCENPQDVVKLVEGGVPIKKVNIGNMHMADGKRQVAGSVAVDDSDVAAFKRLQELGVELEIRRVPTEHAESTDKLFKMQRETSNDSFLEYGQTYHEPIRLTHPDLIHQHQTAITRRYVSQFYCFNCDTYIEVHDGIGVLLVSHTADAADVQEFAMNRLIHIKPNVYFAVVSTTQKLEFELYAESNYSLHVTDFPSQYEFLAVLPRIEMQKILGYYYRIRTPNYCFKGEQHNFFELTYVDEGELETEVDGTLYQLKDKELMIYGPGQFHTQYTDDSHNASYMTVLFDMRNLTPVEQEVWYDALINRVFHYDQKINSLIKAFVRESTTGIPYMNSLMLCLLTEIIIRLLQGTYASPMNQPSNSVHKSAMDELFDRIIAYIDENIYLPLTIPEICEHFSLSRTALQLMFKNSIDQSPKKYINDKKLERSCQMLLENRYTISEISLRLGYTSIHYFSKSFNMKYHMSPSEFVKQNLQNKKMNIGIVGTGSIAHTMAKEFARPTTMPVVAVCSRNADTGIAMAHEFHIPIPKVYTEYDEMLADSEVELVYIATPNSLHFEQAKAALLAGKHVLCEKPIVPTVAQLDELLSLAEERHLHLLEAITTIDHPNYGLAKLFAKEIGDIKTVSCTFCQYSSRYDAFMNGQTPPVFDPAYCGGALMDLNIYNIYFVVGIFGDPKAVHYYPNRHANGIDTSGILILEYPNFVCQCTAAKDSSAHNSAQIIGTEGSILIEPGSNDCQKLVVTRKGKEPYISEISDTPWWFEVLGISNFLIVPQDAVKERRIRAMRSAVAVLEAARKDAHLDFMALVTTKELMLDAQKNHYAIGAFNAENMEMVQAIIAAAEELRAPVIVQTTPGTLKYASPAMFHAMVAAAASEATVPVVMHLDHGSSYELAMKAFRAGYTSVMIDGSHHVFEENIEITKEVVRACHAAGIPVEAELGKVGGKEDDLDGGNGNGYTVPSEAAEFVERTGVDSLAVAIGTAHGVYKGTPKLDIDRLSEIRKVVSVPLVLHGTSGVPDDAVRECVARGMCKVNYATDLRIAFSKGLKEYLAGDPEAFDPKKYSAVGREQVKEYVMSKILVCGSNGKAMINWEVILWTCVTLAVVMGVIALILYAISAKNMRNKRKELSEVHTDMKVGSRIMFAGGIYGKIVSMEDEDTLRVEVAPKIVITISRYAVQSIVKMIGLVVTGHGHFADGIHTSAQMIAGENEYVRYINFEEGMSPEQLAEKFNAAFDEFRTCDGVVVLSDLPGGSPFKTAVECKYARPDQKIEVIAGTNLPMIVTAVTMLDMEDDPRSLAEELVDTGKDCMVIFELQAPAEEAESDESDGIMSIFNLTDEKMKETSSTFTAHEIYQQPATWRKTCAQLAGCKDELQAFIDQVVKQDDFDIVLVGAGTSEFVGNSLFQALNPKYNYKVKSYASTDIVPSPENFLSRTKPTLLVNFGRSGNSPESLGNVEAAEVVCQNLYHLFVTCNHEGTLSKMAASRKNCFAINLTPETHDQSFAMTSSYSNMYLATYLALNLDKLDEITAEVEKLAVAGQHFLDDQFGEVQKIVDEFDYNRIVYLGNIGLKGVAQESALKTLELTAGKVATMYDSELGFRHGPKSIIDDNTLTIAYLSDDEYRRRYELDLVKEMAHQRKGNKIVVVYNHDCEGIEELADYPIQIKIGQDMENVLLGLDFILFAQTIALMKSLSLGITPDNPCPTGEVNRVVKGVTLYPYTLKMVFCPNHRQGSPERTLPAILLYHTPIAENKGATERHNFMQTEAVFSLLTDHFLAMFAETSNKSIENYKYFSERMRYNGTRIIHSEGGQFRMIIQSKKVWIADQFVPAAIEVKDGKIVGIFPYGTKDVDDDYGDKRIVPGFMDIHCHGAYEFDTNDANEEGLRYWAEHIVSEGVTSFLATTITQSVEVLTNAVANVARVMEGGYDGAEILGIHFEGPYLDMKYKGAQPEQFIAKPSVEQFKHYQEAAHGHIRYVTLATEQDDNFELTRYLTSQGIVVSIGHSAATYEQAVMAYANGARSMTHVYNGMTPFNHRANGLVGAAYRIRTMYGEIICDGCHSTPAALNNYFMSKGPDYSIMISDALMAKGTPVGSKYIFGGNEIVIYPDGSAHLTSTGGLAGSTLNINKGLKILVEDAMVPFNYALNACTINPARCLHLDDRKGSIQVGKDADIVVLEDNYDVLQTYCKGQAKLMKHPLQEMMDKRREGIRCGIPSYCSANELVIEIALRRAKERNIPVLIEATANQVNQFGGYTGMKPADFYQMVLKMASDIGLPENMMILAGDHLGPLTWQKLPESEAMENSVELVYQYARAGFTKIHLDTSMKVADDPEGLLQTEVIARRGAKLYKAAMKGYEELKAEKPDAMRPVFVIGSEVPIPGGATEAEDTLAVTKPEAFRDTVSTYQRVWTEEGVGEGMKDVIAVVVQPGVEFGDEQVFDYNPAAAVDLCAALKEFPDICFEGHSTDYQTATDLYNMVTDGIAILKVGPALTFGLREALFSLSMMEKELVPEEKRANFIETLDQVMLASPANWEKHYHGDEKHLAQCRKYSYSDRARYYIGQPEVVAAMNKLFDNLREYPIPMNMLHQYMPISYAKIREGQLKLDPRELAMDGIVQFMLDYESAVMKQFTYTIKDELGVHARPAGLLVKLAKKYASKVTIEKDGKTCDMRKLMAVMGLGIKQGETITVTVEGEDETVAAEEIAAFLNENVMEENKKPETTSQQDSAPVDYSHYMGTLNRIYRRNNNPKKKRLGDGITSLKQEQKPTAPAKPENGKKDHSFLITLAVSIAIILILWVIKMFMRKIIKDALKIPIEKQDFLQMICYNKRNTAPAERTERTSMNRPVCHAEMVLDYKIKIENGMLFNLVTIKKKNDQKKVKAAFCPSCGKIELYTDIPSGEKEMHFTTVTANPCIDRTIQVDSVNLGHSHRVQKTICDFSGKGINVSLALTQLGMPVKSVCLSHSDGEAADFFKQRDMDAELIPVPGNVRINIKLFETSTGCMTEFNEKGTPLHPETAVDVIRAVKNVLPTTSVLILGGSVPPGFPDDFYYELGKSAQEYDVPFILDASGPLLLNGMEASPVLIKPNEEEYYATFGVHPSVTQEFCASYRQILIEHNIAYGAVSLGEKGALLVTPEAAWYSEPVSVDVKGVQGAGDSMVSGFAYAIAEQHTQGDQLLKMAVSCAHASLELPGTQMCTMAGVEKRFPLTPVKRLCTFMGASKHICPNCGRKMKQQFIGLFHCKCGTSWRRDIGFFERTPDMVFSLERKKVGNKVKQLPTIHHKMENYKNSKIGQETAQKYGDIIEMERPQTEESLRKHPRMTLQNRAKIFSPFAALRGYDEQLAAEKQRTERVPKRILTEEEMSALSDRLMQVTKGMTITVRYFKEDTAHPEVPAVGNYITLTGKADRIDPVFRTLQVGDTVVPFEDLVEISGEGIMEIDQYLGITEDMAAQRTYLAIDLKSFYASVECVDRHLDPLTINLVVADASRTEKTICLAVSPSLKAYKIPGRARLFEAVQRVREVNAQRLQTAIRQNKAVRGEDGKYHFASTSFDANALNTDPALGLSYIVAPPRMQRYLDVSTQIYKTYLKYVSPADIYPYSIDEVFIDVTGYLPYYHMSAHDLAMTMVREVLYNTGITATAGIGTNLYLAKLAMDIVAKHIPADKDGVRIAELDEQSYRYLLWNHRPLTDFWMTGPGTVKRLEAHGIYTMGDLARFSIHGEDRLYEIFGVDAEILIDHAWGYEPCGMEQIKSYKPSTNSISEGQVLTCPYPNDKAKLVVREMAEILMFRLTEKKLVTESITLEIGYDRENVDKGGYRGLTQTDRYGRIIPKAAHGTVRFDAPTNLGSTIINESAKLFERITDPALTVRRITINANKVTPDEGIYQVDFFTDTKKLEKEKKLQQAMLGIKNKYGKNAVLKASSYEEGATMRQRNAQIGGHSAGGSDGKLQKMNRNCRRKTEKVYVKVTSDFDATGYMQPRQITWGDGRTYPIEQVRDFRPANTIADMPGDCYTVMIKGQERCLFFERSDPRFPSRFGRWFVEVETKMKILQELQTRKRVAAFRFEMLSLFFVVCITDEIAVLSMREPRYSILSDINDGIDRAKQGKLALYWQRNIEHEYRCKKVTPAEQQAYTDLQDILAAVPQWSDEEELRSGMEGIGGRVWFCYFWEEHDSMVQLTEDCSGKFTVAYVLDSDVTPEVRKAAAQHAQQQLAECMQEWDVPLMKSAIPEKDKYEYLDEAASHLMQVLTDPESITGMKELFGQRLREQRLKHHLTLEQVAEKADLSANYIGMVERGLKEPGLATIVKILNALNISADELLCDLVPSASHVTDDEISKRLEGLTPMQKKVALDLLDTYITNLPYLTKEEMELAATRLIAMRKNKGKSIAACLNNHTSYIQNPDKTEQGELVSSYQCSPLTVDEEFMLTKRLYEQTTGRRQKSDVIAYQVRQSFRPGEVTPEEANKIGYEFAERFLKGKHAFIVATHTDRAHIHNHIIYNSTALDGTRKFRDFYFSALAVQRLSDLICLEHQLSVIQKKPYRERQKRILYPPKESNRDKLCTVIDNILLHDKLKDFAAFLDALEQQGYEVKRGKHPSVKGKGQRRFIRFRTLGAGYTEEEIKMVLDGKAEHQPPPKQPLPEKKFGLLVDIPTKMAESKTSGYKKWATRFNLKEMSKTLLYLQEKKIDSADELRERAAAATERYHTLGDSIKAAEKRMGEIAVLRAHIVNYAKTRDAYAAYRKAGYSKKFLEAHREEIELHKAAKAAFDEADLKKLPKVKDLNVEYFELLSQKKAAYPEYRKAKEEMQELVRAQKNVERFFAEEKQTHETEQVRMENQKLEDCYYAHSSTIFSEMLGEDENYQRLKNAKIAAEKALQSVISQESWKQYLALDEICNELECARYKAMYLAGAADYEKISKMIVFPFWLLTAFLALMLKWTLNLSAFVLALPMLYIFGCGLYTLYCREWLQFLILLVAEFGCFVLIFMGALIADAAERFSGWVAGLMILTVNIGNTHITVGGYEQDTLIFCGRLHSDPAATVEEYAIRLVNLLQLYGVSPAQIEGGILGSVVPMLSGRVLAALQLLCKARILTVGPGLKSGIKLRLDNPAQLGAELLCGAVAALAECPGPLVVISADTAISLMAVNAKQELVGGVILPGPQLSMNALVQKTAQLPQIDPAARAPESVLGKSTSACLQNGFVLGTASLLDGLADRFCAELGAQTAFYATGDLPRSIREACRTPIHYRETLITDGLHRIWLRNRKGMKYDARACQFNMGTGCVELLLRDGRKISINCTGVEDALDVTMAQRSELDYLIYNDPLAYAELILNGEPEEYLRNAAGSHGLEDMRLIKIGTLIFSPDFAAVGRSKERAFEQKEKVHKHFPLSRMINLKIDPEFQSQIPPLTDDEFKQLEENILKEGKLLSPLIVWNNTLVDGHNRYAILQKHPEIYFSTTPLQFENREETIAWICRNQLGRRNLSPEQKRYLLGKQYEAEKKAAKIFRGNQYTLAKKSGGDHGDNHHSGKKTCDRIAEENGVSRASVLRASHYTRGIDIADNLSPGIKQKVFSGEVKFTNEEMSKLVQVSAEHRSDVLAQILHPEALEVLESASAEFEPEKAEPVPMPTPQTEEFRCYHVPDEFMKVYKSLSRATEMMKNSWKKTLKNNPSYFTDPEKQKVLRFAMQRPANYLTEIETYLEKALAEALEEEKTAMATLKHIASKNSDYTAIEAYLIYQHDEFTGKQLLDEQGKPKLRESYLLDTLECGDFSFATACLLANRKYGKNTQHGDIKSHQYIISFDPRDAADNGLTMEKAQALGLKFCEENFPGHPAIVCTHPDGHNHSGNIHVHIVIGSIRMREVERKPYMQKPRDWCEGMKHSSTAQTMRHLRVEVMELCEGAGLYQIDLLNGSKVRVSEREYWMKQRGQLKLDHENAALLATGQQPTQTKFETAKEVLRRQISEVLNVATSFEDFSDRLLQQYGITVKESRGRLSYLPAGRTKFIRARNIGDKFEKELVLAALKANTERKRTIQSKSDRIGKLIDIQAKLKQGKGIGYERWAKKHNLKAMAQTLILLQENGLLNEDALDQRITELDTKFHDSLAVVKDLEGRMKANKELRYHVAAYASTKNIAQQLKAAKRPAAFEEQHRAELTAHRAAAAYFKANDITKLPSPKKLEAEYAQLASEKAQFYEQYKEAKNELLKLKTAKQNVASFFREEEPAQQERMTKTNVQLTPSNSQHHDTPNNKTHVIKFRVTAEEKASLELTCKLLNLSLSTFIRRAIHNVKIEKTVIVAGGGEETLTAVSTLLAQCSKVGGNLNQLARHFNSGGADTEQIRAKLLDELADLTAFRLHAEKVLGELYGNAQAYRLMTHLVALGKNTLCESEQIPFSVCGKSFYCQLQQDVACAFKTQTAIKTARSPAAKMRYYKLGETPAYYITAWYNLLSGKWEFGKVHATETTVEGVTVELTTNGRHANYEMKLSGFGLDTSANKVYGVVLTTADGSEYGLHHVTNIWRGTELGFNTDETYLASIIGKTVTQITYYTADGVYVLPVNVALMLYVVVEELIPEMSQGQHSNVGTVLFVVGFSVMMVLDVALGMRARKNFWDRNAGLYDCFMRKDRIVYEKMYELICPVVKDKTVLELATGTGLIAKHIVKATAHIEATDASPEMITEAKRGNYSAKLHFSVQDMFSLPYSSKSFDVVIVSNALHIVPQPEKSLREIKRVLKDDGVLIAPTFTHAENSFPGKVKAFFMKLAGFPLHSKWTNEEYLSFLHQNGWAVRNSVVLKASFPLTYTECVKSEVMSFFENTRKPVGFGGKIMVAMMNFGHSAMAEWGLRFLKPAPDAMVLDCGCGGGANIKTLLKLCPNGKVQGIDYSAVSVEKTRKVNARAIAAGRCTVQQASVAELPFEAEQFDVVTAFETVYFWPELAQNFREVYRVLKPGGVFFICNEANGETTKDDKWTQIIDGMTIYTDTALKEYLEQAGFCKIQNHKNKKGWLCITAQKMSKKATEFQRKAMSWMYRGKEIFKPLNTGWIDENVACVREWVANIFFYRKGDTTIMVDAGYNYDRLAEKMGWLGIDPKSMHHILITHQDTDHVGAVEADSPGLFRNAKLYIGEIENRYLTGEVRRKVIYHLYKLPQVTINNEKVLLHDGQVLDIDGVRIECFLVPGHTWGHMVYLIDDKYIFIGDTLWFGADGGYSFISALAEDNKLAVKSLTLLEKKLKKRGLHPLFITGHTGWTDNMEFAFAHKNELCSPFKKKVHDPSAPYDAYDESDDTEENAKSGFLKGVGRMKDSELQIDRSCHVLYSKPCKKEILAKITLHYPEVEREVVWEQVQLRYAELLSKWRTDLGGKKNFHNGVGGTYDCIAIMCFYDVCRDVVTFREMEEIEENLILPSFRKLRFVDINKPFWKKLMYRAFSTAQKHCDTWHDYEMDVAPYENSKPIYYEFTTCPAAEFAKRFGFADIMPALCNVDYASMELLHAKLVRTTTCVDGCRCDYTICGDKDPYVKEHPEYRDENGYRRNKMGWGHCWFWSALRASAKGLLGWCIFTPWDNRLRVSSRGYMLGYSDLKDPSVSGFFRFLAKVGDNGMKMQIVKIGFGGKLMKILVYGAGVLGCNLARNLLRAGKDVTLLARGNWAAEIKQNGLRIKDKFSLRTSVSRIPVVTELAPDAMYDVIFVVLRYTQLDSVLDTLRANRTKNIVFVGNNVQTKALAAALPEKNVLFAFALSAGHREVDRVVSIDLKKITIGQLLGAISNKQLIGRIFHGTKYKVVYEPNMEDYLLCHAAFVMPAAFACYKTDGDLKKLRGDTAYLNRVLDANIEGYRAIRDAGHTILPKEDADFEGEKYRKTCLRFFKLMCATSLGKLCASDHAMNAIDEMSALNRDLKKFFDEHGAAYPVWQALETEAGRYLQMKYAGMPMGMWVLFSGSFQKQLTAVLGYDAATARAITKKAKPQYRQIIRRLPEFEKADRFKMNIVNCAMLGAFILSMPQRPEVDRLTDYYAKSMMTKPMQWFCRKSGKSKFTPKDIAAMKATAALKAADRNPYSWNMEFYEYPDGSGYEGRFTKCGICVLMKELGLYDLTPALCHLDYTMSEAGAATNFVRQYTLASGGPYCDCGYKKKGFVKAGTEAGRMKETYLSRDFRETVALRFPARAKELNTAFDIRLSALLAENAGASKEKQYHLKRQILPGISAYETLQRVMPKEEALQTVHGYVEHLARTSHKQLAALLHIPGLYRLVPGVFVKSTRSVFGPAAGFAPKELQTGNGVWRVDMMKCPYHDTCAEYGCPELCRCFCDSDDISYTGLHPKLIWERSMTLGRGNDHCDFCMKTIKMLKDYPPFQANDFEYLRGRILILLPENDIFKKEDQKRFADLFRKLDAEIRTVPGGHVGFIVQAERYLDLMETFLQRNGIMIICPLFLGAELYYNDMHLAFFEEATAPMRNVIEINHCRVGRYECSFGANSCCYLAAGDFAVCAAARKKSSSCFPLRHYHGITILLDLDAISPEMRKQMEWYGVDLDVIRRYICTENRCCILRSEPTIAHIFSELYTAHSVPDTGYLRLKVLELLHILTRLKNREDVQQTEYFNQHQVECVKQAAALLTQELTVRRTIEQLAQEVGLSPTALKSCFKGIYGSSVYAYQKEYRLQLAQKLLLETDCTVAEIAHRVGYENPNKFSSAFREAAGMTPTEYRKMRPIGMRLMKRILSAAAVLALSASLLVGCSSGTASSVPVSASSAAESTVSSVEETASSAVDENEAAAAQLLNDLTGSYQELWPVILADEYKQTWLDDCTALVGEDNAEAAFEKLSSMVTGDVYGEDAVKAYANGGGAYFCGFTNSLAILTFDGETSTISGTDKDGNVLFSHTYHYIGMEPVRGLYEFQSDDADSGEFTYFFLAPDTSAETYHIEFRYGSDAEALSQYDTGEYAYWLASGISTDCDQTMIDNCIELFCTENLAGMKKQSDLSRLMGYAGNYRYFTYASWVLSAVSALVALVPFVYIWKILRDVLNAAPDYAQAVNIPHYGWMAVLFAVLAYLIYIAALMCSHLSAFRVATNLRLEVSEHLATLPLGFTETFGSGKLRKIIHESTGAAETFLAHQLPDKYNAMATPIGLLVLLLVFDWRLGLLSLVPVALGFVIMSAMTGRRMADKMRQYGNALESMSNEAVEYVRGIPVVKTFGQSVFSFKKFKATIDEYEKWVIAYTKELRMPMMLYTAAINGVFAFLIVGGLLFTRNGVTSEFLLNLLFYIIITPVISLTLTRIMYMSENELVVADALARVDSVLDAEPVPENDHPRHPKDASVSLKDVHFSYDGKTDVIKGVSLKIQPGQMVAFVGPSGGGKSTLANLICRFFDVQSGSVRVGGADVRDIPKEELMDTISFVFQNSRLLKGSILDNVRLGRAQATEAEVLAALKVAQCMDIVEKFPEGIHTVIGTKGVYLSGGEQQRIAIARAMLKNAPILLLDEATAFADPDNEAKVQAAFAQLAKGKTVLMIAHRLSTVANADCIYVVQDGQIVESGTKDELCAQNGLFARMWQDYQASVQWKVAKEGMIEKIQHATASSPEGAKGLVKGVLACAFQNMAFMLPTGLLYLLVKDLLAGSTSERSTFYLLGCVACFALILLTTWFQYNGTYFTTYKESGTRRLTLAERLRKLPLSFFGKRDLADLTSTIMADCEVLEKDCSHFIPGLFGSLISTVLIALSLFAFEWRMALAALWVIPVSAAIVVGSYRVQDKVQARTMAAKMACADGIQEYIETLRDLKASNAEQQYLSGLSGKIRAVEKQSIVAELETALFVSSAGMVLKLGIASVALTGSVLLVQGSIDVLTLFLFLMAASRMYDPMQGALQNLAAVIAMRTNVGRMNEILDAPLQTGSEQLTNQGCDIVFDHVGFAYDSGEAVLRDVSFTAKQGEVTALVGPSGSGKTTVSRLAARFWDYQKGSITVGGMDVSRIDPEKLMSLYSIVFQDVTLFDNTILENIRLGRKGATDEEVLTAAKLANCEEFAEKLPDKWNTNIGENGCALSGGERQRISIARAFLKDAPIILLDEATASLDVENETAIQEALSRLIKNKTVLIIAHRMRTVAGADKVVVLKDGIVAEQGRPDELYARNGLYAHMVDLQSASQNWTIMTAVIYARYSSDNQREESIEGQIRECTAYAEKNGITIVKHYIDRAISAKTDNRPEFQQMIKDSDKKLFDIVLVWKLDRFARNRYDSARYKTQLKKNGVKLMSATEIISEGPEGIILESVLEGYAEYYSADLAEKVVRGQTENILKGRCNGGRGTFGYTLDSERKFHIDPLTSPFVLESFKKYNEGSTMKEIRDWLNENGIKNPVGGAFTYNSVEHMLKNRRYIGELKFRDVVVPDAIPPIIPLELFEDVQEKIAKNKKAPARRKAEDDYLLTTKLFCGYCGALMFGESGTSRTGEVHRYYKCATAKKHKGCKKKTVRKQWLEDLVVNQTMQLVKDDAAMESIIAKVMELQNKENTNIPLYEKQLRDAESGIQNMLNAIQAGILTSSTKERLEQLEETKRELEARIAEEKLAKPKVTEEFIRFWLLRFRKLDMSLKDQRQALVDTFINAIYLYDDKVLITFNYKEGTQTVTFGEATEVASEGNGSDLDCIPAPRTAAQVLCSSPFYLFYRIHLAKAAQCLIIEAVPRCARVRLGCIGMSSQTNTLTEGPLAKQIFLVSLPLALSNLLQVLFNMSDVAVVGRFAGSTALGAVGSTSTLVTLFTGFLIGLSNGINVLVARFYGARHPKDVEKTVHSAAIISAVAGVVLLLIGLLGSPAMLRLLNTKEDLLPGAILYLRVYFLGMPALALYNFGNAVFSSIGDTKKPLMYLSIAGALNIGLNLFFVIVCNLSVVGVALASAISQCVSAFLILRALTRVQDCYALDPHKLQLDPVQAKSILALGVPAGLQNAIFAIANLFIQAGVNSFDSLMVKGNSAAANADGLIYDCMAAFYMACASFMSQNYGAGRPDRVKKSYFISLGYSFGVGLVLGAALFFCGPAFLALFTTETAVIDAGMKRVAVMAFAYCVSAFMDCTIAASRGLGKTVVPTVIVVLGSCVFRVIWVYTIFAHFHTIPALYLLYPCSWILTALAEIAYFASCYKRAMAIFRKPAAAMAKISRRNFMRGAAVGTMGAAAAGLLTACGNSASSTTGAPASSAASSAASSAVTKPSSPVDGKYVTKAMGHESWVHVATTFFDGKITACEVLSHEETIGIGNYACSRIPAAIVEHQSVNVPNLRGSSITSMAVKAAVKEAIELAGYNVDDFSKEVTIAASNEVIEEEADVVIMGAGTSGLTCACRLLEAGYSVILVEKRDIPGGSMSMTYGGVATAGSKLQYNYDVDGSFRSSAMGTLEGMMNFWQTMEKYHRTEFFNGEMPYMTKQYTVAGDLVDWMAGIGIGFNTMGNYESATQYGASTPYLAPGCYEGGAGYAMMFMAQRVEKYEKGKIIYSTSVTDLIKDESGRVVGFHAKGENGASYTLRGKAVCLASGGFAKNPEMLKKYSPDYADFFFNCASSMTGEGIQMGIDAGGYVECENRALPAFLSSYKSKFELAFIHQSAPGIMVNIKGDNIGNIVSDNHYTMAKAKLNKDNGDTFYYVFDESSAVKLRDSESYGFNGYVAMFEKGEAVHYDSVEKASEELNLPNLADAIEANNAAALAGEPDEFGRRNCPYIETRDGLWAIRVDPTFYLTTAGLAIDTDCHVLTEDKKAIPGLYAAGDVCGSIEEKDAKQYGMGFDAALTYGYIMGETLKKEIMYFTPGQNFAIIVSMFKMHEGTGKTQKRREKKKKGEPYGMTIYQLECFIAVAEELNFSAAAERLFTTQPAITYQINALEKETGLHLFERTTRRTKLTAAGQSFYLDMVQMTSFGRQALKKAQDIQDADRSRLTVGLRQLFDYSTFSSILAQFQHQFPNACVDVVPQDNRRPLEQLRSGQLDIGFFYATEHSRDRDISFTPLFALGYHVLMNPNSPLADRRALHLADLKGQSVVSSGAFDSFLSACQGPSLEQLAQVGVDCSKITPSFEGALIMIQMGTAMSIVPCLSTAVIPGIVKVPLLDFPPVTVEIAAMRHAPRLEVQSFIEIAKQKYAHHPDPLRMEALIMIFKPAQLGMAKLDPQELEADKKACRKIGPCGVGKKALYLNSFYIDRRYYLPYGSITRVFKRVAMSSGGFSGKGVFASMAYLVVEYDGGKQKQCNFKDERDVDALLEVLAKEQPQLHLLSAAGEQALEKKAAEKAARKLPELSEDAQHSLTVLRRAKEYLDAKPELSAELSAAQRRKRAQLQSKPVYRYVALAIFVLGVAAAAYGLYSVFSHTGSYGVYFALFGFAAIFLFSSYNMLPTAHNNNNAIMKRAEKAEAAMAEYVKHYPHGTFPVKSWYAHPIVLKQMMDAVEEGRAVTVPEALDAVKARLKSLNADVEVEQEEYDEVVVIKALFLNHDYQMISFLLCLALLIVGYFVYGKIVDNTFGPDDRETPAVRINDGVDYVVMPQWKLFLVQLLNIAGLGPIFGALQGALWGPVVFLWITFGTIFAGGVHDYFSGMMSERNEGASIAEVTGRYLGPVMQNIMRVFSVVLLIMVGTVFAVGPAGLIVTLCKNGGMSGLLTTTLFWLIIILVYYFIATFISIDAVIGKIYPVFGICLIIMAVGVIFGIFTNPAYTIPEIWANFSNMHPSNTPIWSFMFITVACGAISGFHSTQSPLMARCMKSEKQGHFVFYGAMVSEGIIALIWAAAGCALYTITDGKMVGLAEALAAGQSAAIYDVCLKTMGNVGVALAMIGVVICPITSGDTAFRSARLTLADWLKIDQDSYANRLKLCVPVLGVGAFLGIGNALGFINYTVIWRYFSWTNQTLAMIVLWAASMYLFKEKKNFWITAVPATFMSAVSCTYFVLAPECLGKMINTYADGKLVAYNTAVAYPIGIVFAIAMLALFLHATKKSSTSKAMTDLWLHVNTFFIIVLIFFRYGSYIKKYMAAYFICLRKLLFCGDNTFMNITELRYLVAIMKWGSVSAAAKQLYAAQPNVSKALKNLEEEYGLRIFERSSTGMIPTEQGKRFIRQAQRVLQQVDELKQEAHQQRSCAELRVVLTHATYASYAAVDFLQQAARSEQLRVHIRESGAIEALDFVLRQGYHIALLRYAAEDEDYYLRYCQRHGLRQEPIMEFSYLLLTSQDSPLARRQVRELDELNDYIEVLHGDTHLPGEESTVSRWEVNPNRCIHVYERCSQFSILQNLPTAYMWSSPMPQRALEQYHLALHNCPAQKQQMRDVLVYPEREPLQPEEQLFVQLLHKQAEATIKDSGWKKIMPEYRVLRIDEQLYGCEELPAGQPVLCDVTLTDAAGAASILPYPDRELTCLGIDEGDTVCLLPDGTLHKLMHNIYFTRHGETVWNVENKICGMTDSPLTAHGQEQARQLGALVRDSGLHIDEILYSPLSRAADTAKAIAAATGLPARCEPRLREQCFGKYEGTPRDGAEFRISKTHFADRYDGGESMMQLAQRIYNLLDELKADTGKTYLLVAHNGIARVVHSYFYDMTNEEYAAAGIKNCQLVEYTFEMSKKAIQLSDHFTYSRLLRFVLPCIGTMLFTSVYGIVDGLCVSNFVGKTAFAAVNLIMPLPQLLGTVGFMLGTGGSAIVGITLGEGDQKKADRYFSMFMWAALISVSVLAVLGFVFLRPVAVLLGAKGELLDYAVRYGRILMLALPPFALQNMFQSFFVTAEKPLLGFWFTVGAGCTNMVLDVVMVGMLHWGVEGAAVATLISQLVGGVLPVFYFIDHHNTSRLHLCRTQFYGRVLWDACINGSSELMTNLSMSLVNILYNFQLLRLAGENGVAAYGVIMYAAFLFVAVFVGYAVGSAPIVSFHYGARNHAEVHNLYQKSLRLIAVVAVSMTAVSMVLIPYVARIFVGYDAQLLALTSRAFRLYALSFLIMGFNVYASSFFTALGDGVTSALISFLRTLVFQLAALLLLPALWGIDGVWLAVTAAELAALAVSVYMFVTKDQKFHYRHGMIELKRLKLINWHNFENTTFDCARLTYMIGVNAVGKTTILDAIRYCLTTNRNFNALGNKKSGRTLQGSVHAKQRGENAYRRPGHTVAYIGAEFWDSVKHTSFVIAVRVESEGPMQELHPGDQTWYISEDGITLEQLPFIDPRTGAPSAKEDFKPAEGRLSYTRSPSEARDRICRALGIGRAASPLGKKFNEVFQMGTSMDEIPNFREFLYQYILPQPELDLEALQGDRLELENLHAVLAEAQTRADALDEIVRFGREATEKQTEALVNRGAALLARAAADAGEKAVWQERVDAGRRQQETLRTCYAEVKTAEAEARRAYLTAHSAAGASGEGRALDALSEELAHRQTALDAAARRADTAEKAAEKTGNLLAVLRRSGFAAGQKLADLTPDTLPALTDWLTAQEKPLEEAYFAARQHTAALQRQQTEKRAELDAVSGGKWVYPHGDAATRVRDAVNAELKSRGMEPDARIFCELLNVEDESWQDCVEACLGDRRFDILVPPAHYAAAKSAFVALKDKVGPISLLDTPGLRKANRRADTAPADSLAAQVTSENPLAAQYADTILRRIVCCDTPDTLENYPDSATRDLLRHHPFRLERLRTPQRYIGLEARRARAGALAGEMNALAEEVRAAAQAEQNLKAAYSQYQTLLRGTTLEELAALWDARAALTAARAAVDKQAAKLAECRENPLLQQLYKEEEVREAAWEAARTAVEQTGGDLRVCEKQISSCETEQQKAVDTAEKSAQAAESFFAAHPLVEPLSRSRQQALTGPDKSPRAAAQAAEKAQAKLDDALTVYLNSTLEPAQREYNRRYVCDYPLGLAGLEQYRAQHESLVRIDLERYAARLEQAQRDCKDRFRKDILFRMKDDIFNARRQFRELNKVMEQLTYGEEVYRFELEPSRDPQLAAFYQVIVDKGNQQMTEGDSLDNLAATADPAYERQVDELMEKIMADVDENTRARQEGRTAAGATLSDYVDYRTYLDYDIKVTNQVTGQQAYLSRVSRDSSGGENQAPFYVAICASLLQIYQKSENSIRLVLLDEAFSKMTSDRIRPMMELFRRLQLQVLLISTVEKSTAIQPYCDITYSIVRHGDANAIAPFVRLAAEHEETMATIDLLEETANYLLNHCFVLGCVEEQRAKYLYIQDHLNEVRAVFKPLGYAVLLYPAPMQAAALVNEHEGSQARLLKYESILLLVLRLLYLQKRESLAASADEVLVTVEEVQAELQKMNLPRKLDQQTLEKLMRTLRRYNLARPVGRLSGLDSRIEVFPTVLLALPDADLADAAAESARTRTELGLYERPEGADTEAGEGEAMQLFELVSPRLFRPLAGPNRAFYAELLLLLWEECRHTADYSISRAEAVSRAEDYFAALAKPLALDADGAGDEDEQPTRDPHTLAVGFLLRLRRTGWLEEQPGSYESEPTLAFMPEVTPLLDALEEILNPRVVTYTGKLYKAWQLLGSIGQEKSPYENVLREVAADLETLNKSLRALNASIGHYIDRLTHNRTPQEVLELFDQYEEKVVAAAYHRFKTSDNLFNYRAYLEEELDDCEQNQLPRLALDYARVERCAPGEAAPRVRALIQQQRDALEEMSTLMKEIDASHIRYRKRAVQRAQFLLLSDRSAQGSVTALLRRYAEEIRSPEQLFEPDDGPVAARLHLYPAAVFGAKPLYPPAAPRTEAPLAPVRTELLDPERLRQEQQLLLDYARLAVTEENVALLARQALAARGQVNASTLVEEYPNDFTGIIGLHTYSQSPHREYDITMTGNWVERGGFRFQDFVLTRRKEVNTDGNHMKKLKRLAAVLLAGIMALALFTACSDSDPGNPEFDPKVESAYLDALNKTFGTSFENDADIKRLAIEHIEEKHGADSLTGETLWKTKGDGKTVVRQVMLCWELKKDTGKGYVPLFYEAAKTAAIKANSTNVRALLRTVNEEIANAKKNGITLELTALGVGAWTIGGKTYVAIGFELTNTTPMKMRLERSAERDKREIKIILPLNMRKAHAARIPNRPAPPGAFLRSAQKSRQKTGTLAIDEPCRAAVKMKKLSKIVALLLAGAMAMVMLTACSGGGGGTAETTAKENAMIGSLKKQGVMTASENDNTLRKKTMEILNQDIADAKLSILGATFMANVHVDGQKDKYLTVTATTKYEYGKIMLNLLDFIAKEVGQKVPGADVNVKANGAWSHVCVVVKADGNKTYLAVAFQILNPSYGKMQHCPARAAQRLAAAVLALVLLLCAFLPHAHAAELKEKNGIRLLSFDTSHILSIGNQTSGKCSLYALRYARTILDGKVCSGSGMWSNGAVWSAAGYTGYSGTRAECLKKLYSELSAGRPVIVHLKNTTVSGVKRHTNRTSTYEYHLTSSGWSEVNYPHIATSSTYGHWVCVAGISPTADPENLTESDFYALDPARVTANGRLAVTRLLDHTLWVENSPLKVLGMFDFLSKKDRTPPALPQGTVRRRYIITGQVQGVGFRYRARYAAQTLDLTGWVQNEDDGSVTLEVQGDPDKFISLFAMIQKSDYIQITGIRSKNIPPDPWERGFSVKGYMQQTAHKVVVIGHRNPDTDSICSAIAYAELKNKTSDLVCEARRAGKMNQETEFVLKKFGVTPPRMCTDVNPKIRDVDYRQVPGIPGSTSLRKAWEIMRDQKIDTLPVTSEDDELQGVITVKDIATANMDLFDTGILAKSRTSYRNILETLGATMVVGSEDAECTTGHIRIGTATPEMLESSMEKGDIVILTNRYESQLCAIEKEASLIIICNGAKVGRTIQHIAAETGVAIMSAPCDTYAAAKLISQCAPISYYMTRDDIMKFTLVTPVADVTRVMAKVRHRYFPILDADGKYCGMISRRNIINLRKRRIILVDHNEATQAVEGFDQAEILEIIDHHRIGSLETSGPVYFRNQPVGCTATIVTQMYDENGVTIPQKTAGLLLAAILSDTLVFRSPTCTPIDVNAANRLAKIAGVDINEFANEMFEAGEKLDGKTAEEVFLQDFKVFMCGDIRFGVAQGSYMTRKNLTAAEALLKPYLEEARNKQNVEDIYMLLTDVPKEESVVICNGRYAAEVLTDGFDTQPAADASWTLPGVVSRKKQFIPALMTAYQELMKSSKFTSTPLFPRQALVALLLPLIAEQALSVTIGLADTLMVSSVGEAAVSGVSLVDSFNTLMIQIMSALATGGAVVTSQYIGHQEPKNAKAAAAQILFVLSSFSVLVAAVVIGGRHAILRGIFGSIDADVMRYAETYFLLSALSYPFIGLYNAGAALFRAQGNSKISMLSSLVMNVVNIGGNAVLIYGFGMGVMGAALASLVSRAIACAVVLYLLQKPGCALRVDSLRAMAPNGGLIRRILRVGIPAGIENGMFQIGKLSVSSLTSTLGTAAIAANAVANTTTTFLNIPANAVGMAALTVVGQCLGAGEKEQAVYYSRRLMLTAYCGAWVMNLSAFFFANRFAVSLFNLSPEAQAMALDIMVWFNIVSLFVWPSSFTLPNILRAAGDARFTMTVSIVSMWAFRVGFCYLAVLCFGGGLLSIWMGMYLDWVFRSLCFYLRFRRGSWLEQSVIMKRSWLARHPIGFMALYTIFYLSVFHSLEANVPLRSILVHCRLDDLIPFCKYAVIPYFAWFLWIPFTLFYLLWKAPREDFWRLCLPLFSGMTIALACYAVLPTALDLRPYWVPGSDIFAQTVRFLYRTDTATNVCPSIHVFNSVTLLLAYYRSRIFDAPHRRWMRPAAAVLCISIVCSTVLLKQHSCIDVALGALLALALDSAFTALERSQLPQVRRAMQNQVPVSQNRPVTGRFAPSPSGRLHLGNLACSLLAWLSAKSQGGRIVLRIEDLDAERCPRVYADLLEQDLAWLGLTWDEGGSTGGAHAPYYQSECGDIYTQSYRKLEQRGLVYPCFCSRSQLHAASAPHTSDGNVIYPGTCRGLTPEEIAEKRKKKAPAYRLMVPDEEITFTDGCMGTHTENLLRDCGDFYLRRADGVFAYQLAVVVDDARMGVTEVVRGADLLSSTARQLYLYRLLGLQAPRFAHCPLLLAADGRRLSKRDGDQSLENLRAKYTAPEIIGKLAFAYGLQPEPAPRTPESLVPDFAWTKVPKQDICLPEGLFMVITIAGGGSTFTAGIVKSIALRREELEVDEIRLFDINKERQDKVAVVVDWVLHKELNTDIKLVVTTDVQQAYTDASFVFAQMRVGGYAMREQDEKIPLRHGCVGQETCGCGGMAYGMRTIFPMIKLIDDVEKYAKKDYWILNYSNPAAIVSEACRKLRPKARIINICDMPIAIIDVVAAAMGIQNKKEIVYDYFGLNHFGWFTSIQYHGEDLMPKLRAYIKENQILLPESYLKGMGALTSSSSQNRHTKGSWYYVWKGEYEIMENFPEYLPNTYLNYYLQAKEFVEHSDPNHTRANEVEETREKNLFDGIDHYLKTGEVDANTFYAGSHGDWIADLSAALKNDTKARFLIITENRGAIPNMPYDAMVELPAYIGKNGPEVIARDNIPLFQQGLMMQQLNSEKLLVEGCVEGSYEKVLQAFTLNKTVPSMSVAKAILDDMIEANKGYWPELHMKEKVMNGLEKFSKAMLSPLSYISAAGLILVLGALLTSTSLSAMIPVLQWTPIKLLGQLIYNCIMVIINNLSLMFCVGIAAALAKKNKQQAAIIGLMSYFMYLTAGNVTLTQLGMLAEADPMVGLYGTGQSTVFGIQTVDMGVFGGILLGLVCGWVYNRTCEKQFKGIITQIYSGNRWSFTCMVVFSILFGFGSCFFWPPVQNVISALTDLIATSGNFGLFLYGFLERFLIPTGLHHLIYTPFQFSALGNSLTVGDATYTGSYIVMMMEYSMGLPFSDGIVWMYTGFTKTFGYFGIVAAFIFCARKENRKKTAAVLVPLAFTASLASITEPLDFMFCFTAPILWVAHACISGLFIVLLHIFHVTGFTTNLLGSVLMNLSAGADKTNYPTLYLLALCQIAVYFVVFTLLIKAFNLHTPGREEVSTETAGSDAPAKKASVKNAAEVQCVIDGLGGKENILSVDNCFTRLRVNIKDPAKLDEAAINKLPNSGIVKKGTDIQIVYGLQVADIKRAVEAQLENQMQAVKVFNNNAVSVVMPDGREAILVGNGLGFGRRPGDVIDKSRVSKVYYVQNELQTKFLKMLDNVTPQVMQAAERISLAAEEQGILLSSKSTISLVDHISFALERVEKGTFLPNLMLSETRMLYPKEYAVGQRALELVRQFCGVQLPEDEAGYIALHLVAGAADGALAYDTVKFVKAVKEIICDTYHCTFEEESLETTRLTVHLKFLAARILRHTPWQDAGLESMYTVLLQRDSRNEVCLQRINAYLRQEFDYELDHQEQVYLLIHLTKIVGMRGTARNSSCIFVYPAQVCLKFVLRRTIDNAVRRTYTMTSKYIRPLALLLCAAFLGCLLAACGGSASSPASSAAPASDSASASGSSELPSSTTEANTGELNPGNFDENSVFSITGTSNAFAPCLGWGPGVSGCSLKSVIAAASLLHWAEDARMSSRSPEAIQDAFYSWYDGLTDNQQEGFAEAWPLVKDAALDLLSDKDSMTGRIADAGLDADTLPGCTLKNWQALQSVLDGIVPETNGEAMEASKVYYTDFRCPVGTSLLEKLRRVCIAAGIKDIDMDGRFVAIKMHFGELGNLAFLRPNYAKVVADLCKEQGGMPFLTDCNTLYPGSRKNALEHLSCAQLNGFWPMTTGCQVIIGDGLRGTDEVEVPVPNGEYCKTAKIGRAIMDADVFISLTHFKGHESTGFGGALKNIGMGCGSRAGKMEQHAAGKPAVQEGLCRGCHRCAKECGSDAITYNAENKAVIDYDKCKGCGRCIGACSFDAIYSPNDCANELLDRKMAEYAAAVCHDRPCFHISLVQDISPNCDCHCENDAPILPDIGIFASFDPVALDQACVDACLNAAPLPNSQLGANLAKPGWNCYHDNFKDSNPNIEWKATLDQAEKVGMGTRQYVLKKVMNDFDTFRREAVAAVRVALQWFFLAVPMGLLCGFLGTLFHLAVEHATELRAAQPWLLFLLPVAGLLITALYKVTKCEGVGTNNVIRAVQSGEPVSILLVPAIFLGTVLTHLCGGSAGREGAALQMGGSIGWNLGTLLRLKDHDRRTATISGMAAFFSALFGTPLAAACFAMMVEDVGLTFTSAFVPAFTSALIAYGCSLVFGIAPTHFALTAPELNVRTALLVILLGVACAAVSRLFCYTLHFMEHTVPKLLPNPWVRVFAGGVLVIGFSYLFGVGRYNGAGMSVITAAVEQGQALPWDFLCKIFLTALTLACGFKGGEVVPSFFVGATFGCVVGPLLGLPAEFAAAVGLVSIFCGATNVLIPSILLGFELFSGAGLELIALGCGICFMLSGHHGLYSSQTFVTNKLRSEYMSHKWRVKVKKAEEMLQEGFITFFEIIKAILMGIVEGITEWLPISSTGHMILVEQVVKFNASEEFMSMFRVVIQLGAILAVVVLFWNKLWPFGLRQGKVISKPSVWNLWFKVVAATLPVLVISPLDDWMEEHFYNYITVAAMLILYGVLFLVVENRRTTPRVTKLEQISYRDALLIGVWQCLAIIPGTSRSGATIVGGLLLGLSRACVAEFTFYLAIPVMAGASLLKVIKFAVSGVSITGTEIAVLLVGCVVAFVVSLAAIRFLMDYVKRHDFKFFGVYRIVLGAIVLAVAAITALAMRNFFKSSSSIPYYEPLCIQIIEIFPRALYLSAPGNVLYYKNKKSVRFLRPALKALRTTRMNILVIGCDQVGAALIRDLERIGHDISVVEKDPEQLKRLDAFDDYTFHGTALVGDPTDPDTLRRGGVENCDAVAAVTEEDSVNLMAAQLAKNIFRRDKVICRVSDPHLQILYHKAYELETICPTVLTEQAVFRALSKMKVCIAGGGRVGMYLAQSLLSHHHKVTIIEPQEALCRTLADTLDIPVICGDSLSFDTLRTADVASCDAFVAVTNTDETNLVACQIAKREFGVNRTVARASNPKNRDILHTLGVDTVVCGTDNLSHILEREIETDTIRQLLSLGGGTASLNEILLPEDFQFAGKEIKEIPIPGDAILVSITRDTEFIIPHGSTVLLPWDRLLCLTQDDTLHLLMDAWGLSSHKMSEQELLRTALVLPPRARRVLCVWAAVPGLVCAPFAFWQSVWAGAVFCAVWAALVALVRVRCCSFVAALTADSVTVQSGVAVPVLHRIPRRAVTGVQLLRTPLLWAAGCTVLLVRSPGLQLVLPGIPAAQATALAAVLMEGNVMNREKHFHPLAALHLLRKTLLVYLLPLVQVLFDRNWDALRAALRQDLVLLFFISAVCWAVYYGGRWQVDAEGTVHVSWRLGVRLDRALRAEGLAALMLEQPLLYRLTGACRVVLYPVGQTKTITLYLTRQQAEELADVLLPVTDPLWHAPKGGEKLAFTVLGANGLSTLILWWLAIHQTQSYAPDAQTAALAQLGQLAAFAARWLPLGTAWLLVLAGTLFCISLVRSALQAVHYTVWRTDTQLGSRGGFIRRYEMRLRLCQLNYADLRRSPATWALHYCPVFVSAGACRPELPLFVWREGTPLLRELLPEMAQLPPDTRADTTDRSMVFFLPAGIPLALCLLLTAVSRTTLPALTLPLLIPTGVFAALLGAAAVGWHREGVWQQQGQLLLCRQHRFHLHQLCVFHPDTGFTALQSPWAVTVQRANLTLVFPGKEKVTVRSVPLAALDFLEIMIKTVLFDLDGTLLNTIDDLADAGNWVCAQNGWPTFTVAQFKLMVGNGIPKLVERFSPADARTPALLAATLAQFTARYDAHKEDKTAPYPGIPALLDALKAEGIQCAVFSNKADALCGGIIAHYFGTGRFDAVRGNRPGVPTKPDPTGLYALMTELGADPAATLFVGDSDVDILTGHNAQLPAMGALWGFRGRAELTAAGADALAEVPEDILRYVQERNKMLFAWEAGAPERFFAAKLTRKPVFQRTYVNKLRISKNCKFFMLDIKFVRENPDAVKENIKKKFQDAKLPLVDEVIEKDAKYRAALKEVEALKAARNKLSKANGPLFGQLKKCTDEAQKAELQAQIDANNAAVKADADKMAELEKEEEALSARIQEIMYSIPQMIDPSVPIGPDDTYNVEAQRFGEPVVPDFPIPYHTEIMESFDGIDMDAAGRVAGNGFYYLLGNIARLHEAVLAYARDFMINKGFTYVIPPFMMHGNVVQGVMSFPEMDAMMYKIEGEDLYLIGTSEHTMIGRFIDQTLDESKMPLTLTSYSPCFRKEKGAHGIEERGIYRIHQFEKQEMIVVCRPEESADWYEKLWKMSVELFRSMEIPVRQLNCCSGDLADLKVKSCDIEAWSPRQKKYFEVCSCSNLGDAQARRLHIRIKGKDGKTYLAHTLNNTCVAPPRMLIAFLENHLQADGSVTIPEVLQPYMGGLKVMVPTNKKNMARGKGGLGRGLDSLFEDAAPVFESEHAAVETLPLREIEPDPDQPRKTFEQETLSELAASIAEHGLLQPIAVRPRPMGGYSIVAGERRWRASRMAGLTEVPVVIKDVSDEQAMELALVENLQREDLDPVEEAAGIRELMTRCDLTQEQAARKLGKSRSALANSLRLLNLPETVLELLKSGFINTGHAKVVLGLPTPELQAEAAQIIADNQLNVRQAEALCKKMAKPAKEPREPAPRGTLPVEVEESLKQVLGSEVNVAYHGGKGKLTVHFYSDEQLRAFANLLGQYQMETEMFHVEQIFPREEEKRVAKIVAIANQKGGVGKTTTAVNLSSCVTALGKKVLIVDLDPQGNTTTGYGIPKRSVEAGTYEVLIGRATAAQAIRHTEYRTDVIGSNTRLAGASLEMIDLPGREGRLRKALAEVQKDYDFIFIDCPPSLDLLTLNGLSACDSVLIPVQCEYYALEGLSELISTLKTIRKKYNPYLDIEGVVFTMFSLRYNLTVQVVEQVQKYFGSKVYKTTIPRSIRISEAPSYGQPINFYEPKGKGSEAYMDLAIEFVKHNRPQEPKKSRAKAAPAAEPAKNALEDMSEVKKVVLAYSGGLDTSIIIPWLKEHYNNCEVIAVCGNVGQKGELEGLEERAKASGASKLYIEDLTDEFVEDYVIPTMQAGADYEGYLLGTSFARPILAKRVVEIARAEGADAVCHGSTGKGNDQVRFELAIMHFAPDLKIITPWREWDIQSRDEEIDYAEAHHIPLKISRETNYSKDKNLWHLSHEGLDLEDPGNEPQYDKAGFLELGVSPKTAPDKSEFVELEFEKGAPVALNGEKLKPVAIIAKLNEIGGRNGIGLYDVVENRLVGMKSRGVYETPGGTILYKAHEVLETLTLDKLTAHKKRELAITFGELVYDGQWFSPLRKALSAFVTSTQEYVTGKVRLELYKGNLINAGVWSPFSLYREDIATFAAGGDYKQSDATGFISIYGLPTKVQAIVNSEKEGEMATIFSREEKAEALFGEILKNPEACRRLMDTFNDSLDMADVLDAPTVSAQQFAAALFNAYENKDLSAFLMAICQHSMFDLLRNAALIPFKFNADGQPNPVILTDDAGVLLPNNKFAVSSKVYDRFIRVFQKQEKVKMYLASGYCKYHGYDEGSMDVVEYHYNQHLGLLLIYELPDTVKQKVTEAEAYSTVWDIQMKLQHALPRSVVYYGQDTLKDGGTRYDELGVFLPLEHFADRLERHVETATKIVYGEMGQRQSEIIKNHMEVYWHDYASASKGVPITEAGLVEKASVIGRTGLMLLECGTGAWRVRSSMNTLSRELGVTTTADIGLLSIEFTCFDGDQCYTQSLCLTNTGVNTSRLNRLEHFVNDFDREGKFMTGEELHSHLDEIERIHGLYSPIALGFAAALACGCFTFLLGGGIVEMLCAFCGAGIGNFVRCKLTKHHFTLFLGITASVCSASLVYAILLKLAEVLFAVSAQHEAGYICSMLFIIPGFPFITSGIDLAKLDMRSGLERLAYAILIILVATMTAWIMALLLHLQPVQFPALSLTLPEEIVFRLLASFGGVFGFSLMFNSPRNLAVCAALIGAVTNTFRLELVSLAGFPPAVAAFLGALLAGLLASCLKSAAGYPRISVTVPSIVIMVPGLYFYRAIYNLGILSLMNSATWFADAILIIVALPLGLIFARIVTDKTFRYCTMGMLQPFQDCGAIIREIAGRVKRILGMPAMFVWYFKEENTLRFWRLCGRIEKTRRKETAVTLQQLRYVTAVAGTGTISHAVQQFYISQPSLTNAIRELEQEVGLALSKTASSVVSRTLLDARGQMSAKSMHPPAYGQRKCQKKKGVQEKMKHLHKGGWCHPHSTRRLAFCRGCRIRQNTTPAKGALPGRLSPSTAALKTHRPRLRSAAMKAPVGLLSGRTVCDSRWRDLAPTSSTNVSKLLRRKKMSIYNALYGRDGHGVGPNEPEKKGFARFCQMVGRDLGQLLGTNLMVCVLCLPAALGVSLGVTLLSLPLTVVCSAVTGLLTGPAMVLLADCALRSLQNDPSQWLPRAKQTLAAHWKAACGFGCIGTLVLGLLCFVSAFVFEAAAQQGYYPGLAVLVFLALDFLVLAVLATLCAAVLPLQAPAPDVLLRRAGRLLAAAPARCVLAGVLMLAGIGGMILLFPVSIFWAVLFGFWLPGLAAMQTLFPVLRQEYGVEVRSIPRPAAPDKPLTAQEQKKRSRANWWYYNWGIVAVAAMVIVGVAYVAHGLLTTVDPDYTVAVVTAEALPDEAVQRLQTALADYAEDANGDGAVVVQVNNYTWSADAALTDMNGQMAGATQMNTDLANGESKIWILDDPEGFEQAYGALSEKLGADWQAKLIPWSSRPALSGLELGSYNTAADGSQTVNIQSRFAGYSVAVFDASDALWQALNSMETIKLKILDEAGHTLMTCDADTAVSLVYTNCYKPGDRVALEIDHPGQYCVIQFEDTMPEALVYVVKREINFHIPFGEQAITYSPKSFVGSRHVIRARLALPEEIAARRNLAFNCYDEHGDTGFYPHASANVETRGEAVFAARNAIDGIFENSAHGEYPYQSWGINRDPGAALTLDFGREVLLDELRITERADFPHDNYWVKATVEFSDGSTLDIPLVKSAKPQSVAFEPKRVRSLVLKDLIQAEGTSPFPALTQIEAFGTEVKMIQEQLAFLPEFLPDYRPFPPAKERTAWQGLPLRAKQRFLQAGEAALQTPIAPLPLSLWLDFTHTGRRTPWETAYFSRRARLCALVSAECVEHKGRFLDEIADTVWALCEESAWQLPAHNSYIRDTPQLPLPDTTRPIVDLFAAETGALLALTRYLLPDELDTAAPGTTVRMERELDARILTPYFTSHFWWMGNGAEPMCNWTSWCTQNVLLTVFLLPTTQQQRQVAVKQAAYSLDCFLKDYGADGCCNEGAQYYRHAGLTLWGCLEILSNVAPQAFSPLFHEPKIKNIAEYICNVHVGGPYYLNFGDCSPLAGRCGAREYRFGQAVGSDALQALAAADFRADADPDHLQNPDGSTHINLWYRLTTAFAEEEMMTYSAAPRHHLTVWYPSVGVYAARQGSWVLGAKFGSNGDSHNHNDTGSITVYKDGRPFLIDIGVESYTKKTFSPQRYEIWTMQSTWHNLPTFNGIQQLPGAEYAAREVCTAENSITGELAGAYPPIPELTTYRRSVSVSEQGITLRDETDYPGTVELTLLTEQQPVPAADGFAVGTLGGIRFDPGAVTAAVTPVPITDPRLRTAWPETIYKITLHFQKMLNLELYMLRILLVDDEPLVLIGLQGMLEWEKLGYTVCGTARNGKLALELIEREKPDIVIADVKMPVMDGLTLARTCRERSALPAFIMLTSFEEFGYIKQAMGAGVVDYLVKLDLTPENLQTALAKAAEKVKKERALLGELSAQENLAESVRSYQERFFVRLYAGLFPDEAALEQPLQHMELNLASDAYLVASCEIIANTALTPAQQLKLSFSCGRMLETTLQNYLPCYVTGADAMRCNVLFCLTDAQCQNYRTVLRPLLERASQILYNYFTVRLLWAVGRPTGSLLGLARCCRENAHLQPLLTVEQPIQFVEVNEGDATAGKMQVVAQVQEYIQSHLSERLTLADVAAVFNFSPNYLSQLFGKYGDSGFVEYITETRIAAAKEMLEQGDLKVYEIAEKLGYESAFYFSKVFKKVTGLSPREYQQSIMKSSHRFPLRRQIVWGMRFFTILTSLAVGAALFTLSNQYVRANSLQAAEFNLRLVATSIETSLDSADALLNWASIDSTVRRYISQENINGTQTIAAYEAVQEKYYSSTLYSHILRFFITNENDRHLQFGTLNSSAALNRTSIKQFLPKGYGMQFTTDPLLPGSPDCIALSQPVRCGKGTLHRGSTYLALDTAIITDPAAGYNLTDGSALYWEMGSRLWQIENGSLTETENPLREVDYTLRTGSNNGVTEQTAWQGKVRLDGQKYYVVKVTLNGRSAALVQLLPANTFLLHYGVYLWLITLGIAIIWGLSFLMQHWLEWVITRPVEALQKRIETVGSGNFAPDRTVEWNNELGDIGRGINQLAENVDSLMTRRVEDERRKQELEYRMLQNEVNPHFIYNTLNSIRWMATIQHAPGIAEMVTAFARLTKSISKGTQKLVPLQEELALLNDYFTIQQYRYGGDLEIEVSRIESETLCRDCMIPRFTLQPLVENAIFHGLEPKGGHGSVLLDISTDPDTGDVLLRITDDGVGMPPELVAHLLDEPAEGAEKAEKFRHVGLWNVNRRIRYSFGEGYGLTIESEEDVGTEVTIRLPYQQKGDSHAADITGGMCIACNGLPRAGEPLAFVDTRIPHKRKNRNGKIPGRVAVFLYLLKKDALSYTGVCTFLFSCTVYIHGTRKKRIKYTIFMKKVVDKPRRNQYCIKERMQNITGKEAPLMKKISRRSFLTAAAACGAAAALSACGGSSASSTAASSTAGSTAASAAAGPVTLQWSVWDKESTPYWQAMADGYMASHKDVTIEMVDLGSSDYMTVLATQLAGSADLDVVTVKDIPGYANLINLDYLKPLNEVLTRDTGDFNGTIEQLTTDDGNFYAVPFRSDFWVLYYNKDLFDKAGVEYPSNDLTMEDYDALARKMTSGSGDTKVYGCHYHTWRSAASLFSILDGKNTIIDGKYDFMKPTYDMVIAQQKDGICMDYGYLKTSSLHYSAAFENQQCAMVNMGSWFISTLEAYMKDAETKFNWGIVKYPHPAGAEAGSTLGTVTSLAINADSPKAETAADFINWCVSEEGAQAIAKTGTFPACGSAATAEIIKSTEGFPEDSNSVDALTTSNVYLEMPYTQYASDIETILNAEHDAIMTMSETVDEGIQNMNDQVPAVLGMASAAVQNKTPRKVLKKSTRDSLIAYSFIAPNFIGFCVFTLVPMVFAIALAFCAWDGRHAIEFIGLKNFVKLFTTDKIFQAALKNTVVYVIGTVPLTLACSLAMAVLLNQNVKLRNFFRTVAFFPYVASLVAVAAVWNMIFNPSMGPINMILNQFFGVAVENLPRWAAGKDTAMITVILFSVWKNMGYYMVIYLAGLQGCNPDLNEAAELDGANRWQQFWHITLPQLRPTTFFVVIMLTISGFKVYDQMYMITQGGPGTATMTLVYYIYNVAFVNTPKYGYASAISMVLFVLVLIVTIIQFRGSKGENMSAAIIKTEASQKRRNFISKFLIYFFLIVITACMLLPFLWMLSSSFKLNKDVFGFPIQWIPKNPRWQNYVDIWTQIPLLTFVKNTVKITVVVTLLQLFTSSFAAYAFAKMQFKGKNALFLGYIATIAVPWQAYMVPQFMMMSSWHLNNTHLAIMCLQAFSAFGVFLMKQFYEGVPTELCEAARIDGLSEYGIWWHIMLPLSLPALSTLTIFTFVNTWNDFLGPLIYLTKTELKTIQIGLRMFITQYSAEYGLIMAASVVALIPVLIVFLSLQKYFVQGVASTGIKGMLYPEQNEARLKLSLDGTWAFALGSCVEDQFDPAKPLPDAQPIAVPASYNDQNDQTTALRRHYGWAWYQRKVTLPAFCAGQRVALRFGSVTHTANVWLNGQLIAQHKGGFTPFEADVTALLHPGETVLLTVACDNRVNHSTLPVGNEDGQLAFFGSDNAGIPSVEAAKRAAAPQNRPNFDFFNYAGIHRPVWLYTTPKEYIEDVTVVPAVDGTVQYAVKTTGSAPAHVTVLDADGKAVASAEGAEGTITIPEVHLWEPRPGTPYLYTLHITCGADVYDQTFGVRSIEARGTRVLLNGKPLYFKGFCKHEDFTAHGRGFDPVLNVKDVNLIHWANANAVRTSHYPYAEEFYDLCDREGILVMDETPAVGIGGGAAVNPYKEYPLAEHHRQVLAEMIHRDKNHPCVVLWSLGNEPDLEHFPQDAYDYWHPLYELAHQLDPQNRPVTLVCCQNDYTKDITTRTMDIVCINRYYGWYNLSGDMDAACYGLNQEMDFWAEQHKPVMMSEYGADTVAGLHTAGAEMFSEEFQVEFYRRLDAEFDKRPWFVGEFVWNFADYDTVQGPMRVDGNKKGLFTRDRRPKLGMHFLRQRWAEIPTFGFKEMMKTYQNHAMTDAEARQALADACKQVETNLPLYTYQCQNHSSVNNIYPGCANNQWTCGFWPGEIWLAYEATGDEKFKTAALIQVDSFADRIARKVEVDHHDMGFLYSPTCVAAWKLVGSEKGKNAAIAAADQLLTRYQPSGRFLQAWGTMDDPDNYRYIIDCMLNVPLLYWAAQVTGSDHYREIAAAHTATTLANSFRPDGSTYHTFFMNPDGTPKGGRTCQGYKDDSFWARGQAWGVYGSAIGYTYTHDEKFLDVFRKALAFYLSRLPEDMIPCWDMLFAPESGEPRDSSSAAIVACGLLEAAKYVDETEAAQWRTLARQMLASLATNYAVKPGTLGSGQLLHGTYSKKSPYNTCTPEGVDECTSWGDYFYMEALTRLTKDWEMYWMNLQTKADFTALMHKFLDPLKPYYSAGCARLHLGETGVTYNQNAIELEAFSRPLWALVPFWVGGGSEPEFEKIYRKGLAAGTDPENPEYWGTTGEYDQCYVEMAAIACGILTAPEKLWTPLSDTEKQNLAAWLGQINAHTIPDCNWQFFRILVNLALKSVGMPYSPELLEDGLCKIDSYYSGDGWSTDGASVQKDYYIPWAIQYYGLLYSKFAADTDPRRAALYRQRAQLFAQQFVYWFDANGAALPFGRSLTYRFAQNSFWAACIWAGLEPLPLPVMKGLIVRNFNWWLGQKMFDRDGILTIGYCYPQMYMAERYNAPGSPYWGMKSFLLLALPDDHPFWSAEAAPMPALERLKPMPYANMLVQRRAGRVTAYAAGVNEGHGHGQFPEKYAKFAYDTRFGFCASRSREVLNQAAPDSMLAFVIDDNVFVRKVSKTWEIEAGAVTAQWSPFPGIEVTTTITPTATGHRRHHEIDSSFDCEAYDCGFAVPNFAPGYAESVESDTAEAHCDTLRCTVRGRGEAVVIGCDPNTSLYFTNVHLPAVKYHIPKGHTVLDTEILDEADMPLNNPITSALLADPEIFQQNRLPFHAHFADQTSPEMPLTVSLDGEWNFRYAENLTAPFTDWDTLTVPGFIQMQSLQKPGKPYGTPHYVNTQYPWDGHEKLRPGEIPQDYNPIGEYQRSFTLPESWASCYLRLNGADSAAAVWCNGVYIGYTEDTFTPAEFDMTAAVHPGENTLTVQVYRFSSGSWLEDQDFWRMSGLFRSVELFTKPEVHLEDVFVKQSFADDFSSAAVTFDCKVSGAGTVSVVFNGQEQSAEVGEPAEYDSGVVFGKGEVAPDVEEDVQDGSFTFTVEHPALWSAEQPNLYETEIALLREGALVERTGLKVGLRKFELKDRQMLLNGQRIVFKGVNRHEWSCRTGRTVSREEMLWDVKNLKAHNVNAVRTSHYPDDPYFLQLCDEYGLYVIGETNLETHGTWQKLGADGSDEWTLPGARPEWRGNVLARAEAMLERDKNHPAILIWSCGNESHGGKTLWEMSEYFRRTDPSRLVHYEGIFWNREYPATSDMESQMYTPVADIKKFLAEHPEKPFIMCEYSHAMGNSCGGITDYTEYAYEEPLYQGGFIWEYMDHGIAVTDPDGKPGFAYGGDFGDRPTDREFCVDGLVLPDRRNTPKMDAVKAAYAPLKITLTDTEAVIENRNLFTDLNAYDLVFASSVNGKPERRAVLRADCAPGKTVHIAFPFALPEAGLACMTVTAIQRAALPGIPAGYEAAFGQVWHNHTAARLTLPAPQLVEMDCNVGVKGEGFEYVFGRGKGLVSIRYNGVQLLDDTVRPNFWRAPTNNDEGCAEPFTFAFWKTAGLYARCDNLTAEAKDEFVIVRANYTLPDGQTLPIDFAIDGAGRCDITMTWQGARTELPEFGLLFPLRRELTEVSYLGLGPRETTADRTAGGKMGAWSYNVRQDFAQNSPVYPQECGSRTGVYRADLTGAIPGICFAGDSMTFSALPYTPHELENARHLYELPRDDNKTVVRCALFQRGVGGDNSWGAKPHADACFAVEKETSFRFTIQKMMELLSCRYNMDTAIQLFNAAATSLDCVSPIYYLYVALIFISLRFRNKTKVAGITMIPHHFSQVNFYFMKVVKTDKHYMAEPDFEIDHYKDASYPPVASHYHEFYEIFLFVSGNADYVVHDKMFRLKPGDLLIIPPAIMHHPIFRDFEIPYERYVLWLSPPAFDTMKKIDPDIDYFLRPGHAKTFLIRDSVDSSRARFGQFEALTHAYREESLCYHSEGMADILRILIGINRSLYNREHVFAKAQKPSILSNALHYIDLNLSGDLSLDTVAKALFIDKYNFSHMFKQNMQISFYQYVIQQRLLEAKRLLMKKEPISSIPAKCGFSDYNAFYRSFKKNYGVNPREYVAYHIKAIHGEVGGLSLDIDHQSTESMIGTRRITRRSFLAAAGLAAVGASLSLTGCSGSVSDGLSSKHLLVAHSHSEAHPVNVGLQKMTEVASAESDLTFSVYPNGQLGDNAAMIQLVKAGVLDIAKVSASSMEQFNSAYAIFSMPYVFESTEQYFAVMNQSEAVQEIFKSTYDQGFFAIGWFDSGSRSIYTTKDGPCEGPADLKGLKIRTQDSPTSIAMIRAMGGSATPMSSGETYTGLQQGIIDGAENNETVLVQDGHGEVCKSYTYTQHQMVPDIVIISTETWESLDEAEQSAIVNGMTQGNEAHEAVWQDLVQENIDGAKEMGVQFYTIDKTAFIEATQSLRDEFCAKSADNARYYEDFLSYVQAMLIVKFRGLIDKIIQVLSTIIMGVMVIAVCWQVITRYILNNPSTVTEEALRYLLIWVTMVGGAYAYGRRKHLAITALSKRLSFKGQKILDIFVQAMVILFCVVVMIGGGTRLVNTAADQLSAALQLPMPLIYASVPVGAILFIFYALIFIGEDLRDMKQGPKAESAKEAMGTFQVGLLLIGTFALLLALSVPVSVSIIISSVVTMASTLSLDLGTFVASQRMVGGVDSFSLLAVPFYILCGVLMNTGGIAQKLIDFAKILVGRIPGGLAHTNILGNTLFGSLSGSSVAASVAIGGVLIPMEEKEGYDKKFAAAVNIASAPTGLIIPPSGILIIYPVLAGCSVVGMIMSGYIPGLMWALACMVVAYVIAKKNHYPTAGKVPASVFFKYFVDAIPSLLLIVIIVGGVMSGIFTATESAAVAVAYTLFLSIVVYRSIKIKDLPKILLDACETTAVIMFLIAGSNVMSFVMSFTGLPSAIGNALISVSSNKYVILLIINLVLLVVGCFMDITPAVLIFTPIFLPVVQSFGMDPIHFGIMMVMNLGIGNITPPVGSALFSGCSVADMDMEDMIKPILPFYAAIFVALMLVAYVPWFSMALPTLFGAVMVYSVTKYGAVGDGATNDAAAIQSAIDACNAAGGGRVVLEGGHTYYSSSIELKSNVELHLEQGALLKAHSDISTYFNPNGDDASVAAVSGAKAVDRPVAKPAYTFIHAKDADNFSITGQGAVDGNVYAFMKRASRYYFNGDFYPRPTMVYVEHCNHISFHDVTLQNSPFWTLHPAGCNDVLISNIRVLNPLDCTNSDGIDPDHSTNVRIIGCHVQCADDCICLKTTAGNNEYGPTKNVIISNCTLTSTSAAIKIGTEGVADFENILVDNCIITGSNRGLSIQIRDGGCVRNVSFSNIMIETRRFAECWWGCAEPIVMTTHDRNANTHSGSIENVRFFNVTCKGENGVFLSGNEENHIKNVLFENVNVCLEATSKWERGMYDLRPIPPEKEGMLHQKSAAMFLRWVDGVTVRNSTLGFAGEDRSDFAQALLTQNCTNVQTMGLTAEAAAPEYQSIELGMNKKKNIITFAAFLILMVGLGANDAMRGIFSTIFSAHFQLSTAQLSQIVTVSYIGNLVFLAVGGFGVDILGRRKAMLLYTFLWSAAMLLFATTDSYLLLLVGMFFAMGTSTLLNTNMNLITTGMFAVAPGFFVNFLFFIQGIGTSGSQSIIGNWATDISSWHTVAWGLLAIGAVAMVLFVLFPMPEVQEHKTEGKVSPKEIMSCPAFLSLVLIIGLYFIAEHGIMNWLVSYATNALEVPMGQAANFTAVFFGCVMVGRLVLSSLVDKLGIYRCLRLFATSAAVLYTAGVLLGAPGLWLLAVSGLLFSILYPTLVMLIPRYWPSHAASSASGLVLSVASLADILFNAVFGSLVDAIGYRTSFLIMPACMVGCTALLWLFFAKAKKLERCDMQATNLKTNHLTQPLGIDTGTLFLSWQCAEGVRQTAYEIEVTAGAKTLWASGKALGSVMHTETPIAVPPKTQGRWRIRLWDENDQPGAWSTASFETGLAQADWQGVWVCPETEEPDIDCTDAINAFAKPNWEQKQAALEASGKGQAQPYQPHRPASYLRKTFTAPAGESKRLYITAKGLYAAWLNGKRVGDMVLAPGSFTADKHLGAQTYDVTALVREGENELLIALGDGWYRSTSGVDGDRDLFGKEVAVLFQLEVDGKAVCVSDDDMEATQCGPIRQNDLQQGEVYDARLEGELSGWHGVKTEPNSLPITGMNTVPIREQEAFADRLLRTPNGETVLDFGQNMAGYVEMKLTAHAGQKIKLLCGEALDENGNFTQENFQDRNRHKEGGTAQLLELVCKEGENHYKPSFTIMGFRYAKVETDIDLTGAEFTAHAVYSEMPVTGSFSCGNADVNQLVQNSVWSQKGNFCDIPTDCPTRERAGWTGDMGVFIETGLTLMDCYPVVEKWLAECRLNQYPDGRMANIAPPTSRPGYMTPMLCMSAGWGDAAILVPYALYKRTGDRKILADNYEMMQKWYAFLLGRAQQTTEEQQTGAYAKYTVLNGLDYGEWCEPGITPMQAMMNPRKSVGTAYLAYSGRLLAEIAQALGKAEDAVQYRDTAEKAVKAYRAAFTDNGKITSDRQCEYVRAIAFALLGEEESQAAADILNRMVAENGYHLNTGFLSTPFLCEVLAKYGYADTAYKLLLQDTAPSWLYEVKQGATTVWETWTGFDANGHPSESLNHYSYGAICGWLFGGVCGIHLVGETLTIAPTPNPALGWAKAVYDSPVGRIESGWQYAGDAVTYTITVPCNLTAEVTLPDGRSLTLQPGTHILMPIKAVQQFMLGTVLSNEQQAKETLAAMKAAGYDGIELCGFMIHPIGFVVKLLTKAAGMPVGKGGNLDWHTLVQEAGLKVVSLHTDLGSLERDAHAVAEEAKSFGTQHVVITGMYRFDYGDEAAMHELAQRLNKAGEALAAEGIHLLYHNHNCELRHVNAEKRAYDILLEETDPAFVNFEFDSYWFTEGGANALAWMQRLGPRMKLWHINDRGTRITGSAITPILKTDSMELGTGNMDLDSLMAQALAMDVDAVILESHRNWVDNSPIKSFQLSAKYLAQKFMKQTYCNPLDLGYRYQHMKEGPRVAGFREGADPTLVYFKGRYYLFVSMSAGFWYSEDLLDWNFHADPNLLIYDYAPDVRQVGNYLYFCASRKGRNCPILRTADPLTEPFTEVSAPFAFWDPDLFCDDDGRVYFYWGCSNIAPIYGVELDPNTMTPIGEKQELIFGNETTLGYERPGNNGIVDREASVLYQSMKQFYDPKTGKLNLPPQMANIPGLSAESLTAMFNAIGKPYIEGAFMTKHGDTYYLQYACPGTQYNTYADGVYTSRSPLGPFVRQASNPFSAKPGGFITGAGHGSTIADTYGNWWHASTMRISVNYDFERRVGLFPAGFDKDGVFYCNQNFADYPRRIPAGKFDAASQQPEWMLLSYKKPVTASSTAENSSPELAVNEDCRSWWSAAGAEPGEWLCVDLGKENDVRAIQVNMADEKLVVDFPADSYGDDRKTRHIETRPQISHYTMETSVNGADWTTRETVARECSNGYYEYADGIRARYVRVTGGELPYGQPLRISGLRVFGNGEGPKPAQAEAAGARVDALDATITWKHIENAQGCNVRYGVAPDKLYLSWLVYDTDEVTLSTLTAGQEYYVCVDSFNENGITPGKTFKLEGMSKTILLNHSDWHFTKENPGIPAAVMGEAVALPHTWNAVDGQDGGNDYYRGTCWYTLALTKPAIPAGGKAVLQLDGAAMTAAVYLNGEKLAEHKGGYSTFRVDLTDHLKDENLLAISVDNRDNDTVYPQKADFTFYGGIYRDVTLHIVPAEHFALPANGAPALKVTPIVTGLASKTVEVTVEAAVVGAQSVTFALEGQNIAAPVEDGTAKAVFTLHNAHLWDGVEDPFLYIVSAKLDNGEEASARFGCRKFEFDPQKGFILNGRSYPLRGVSRHQDRKGMGNALTNEMMEEDMALILEMGANTIRLAHYQHAQYFYDLCDEKGLVIWAEIPYITMHMTNGRANTLTQMEELIVQNYNHPCIAVWGLSNEITAASAVNEDLLENHRLLNELAHKLDPTRKTTMANVFMLETTSPILEIPDVNSYNLYFGWYLGDLEQNDEFFDKYHTDYPDRCIGFSEYGADANPQYQSSHPEKGDYTESYQCVYHEHIAKMIADRPWLWATHVWNMFDFAADGRDEGGKHGENQKGLVTFDRKIKKDPFYLYKAYWSKEPFVHLCGSRYVDRAEDVTEIKVYSNLPEVSLYKDGQLVETKQGDKVFTFQLPITGKHSIEARSGEHSSVILVNKVDAPNPDYAMDNRKNVTNWFDGELDESCWSVKDNMAAAMADPKAGPILKQIREKAAASRGDVAAAVKDNPALVAMMERAMQRMTIQSMLMQAGTSEEDIKQLNRVLQGIAKEMFQKKPSASEVDGVQYRRAKTWQIICYACNAFVGMSVYSLIGMASYSASIGYGITTATVGIILMLARILDGFTDPLLAFVYDRVNTRFGKLRVLLISGYLIEAVGLLCMFNLCSSKGFGLPVFALTYIIYIIGYTVTNMTAQTLPAIMTNDPRQRPTIGVWTTALNYAVPMGMSMLIYTVILPKCGGTFNQDFLSTVCTIVLIIAGIGTLIVCAGISAYDKPENFEGTNKKHESLKMADVLEVLKHNKPLQCYIASNASDKLAQQVGSQAIINTMLNGILIGNMGLATTLSMISMVPSIFFAAFGAKYVGKKGSKKGIVTWTCVSMTITAVLILFFIFTDTRQIGVIGSWNMIVYVLLTLLQNGSNMCITTSNNSYMADTIDYELDRSGRYIPAVVSGTYSLIDKLITSVAAVIATGAVALLGYTTTMPQPTDAYTSGIFWMTLAIKYGLPMLGWVVTLLAMVGCPLTKEEMVNVQKRIADKKDALRREVIAEHMQMQKFEKGFFIGAATAAHQVEGNNTNSDYWAQEQLPHSSFTEPSGIACDHYHRYEEDIKLLADAGLNAYRFSIEWARVEPEEGTFNPEAIEHYRKVIACCKAHGVEPVVTLLHFTSPKWLICKGGWEAESTVEDFKHYAAYVMEQLGGELHYVCTINEANMGLQLAAISKRFRLMAEQAAKNAAAAGKSAEGTVQVGMNFQKMMENMKYAAMENAQVFGTPQPQIFVSERTPEGDLLVLRAHAAARDAIKAICPQVKVGLTLSLHDLQAQPGGEAFAEAAWQEEFTHYLPYIKEDDFLGVQNYTRTLYGPQGQLPAPEGAELTQMDYEVYPQALERVLRKVAEKFKGDLIVTENGIATADDTRRVAFIRQALDGVQHCIADGIPVKGYFHWSLMDNFEWQKGYAMQFGLIAVNRETMERTAKPSLAVLGEYCGAMDVLQNMMLFSELVQCGGNVYTWCYDAKGKLLRSNCPDEAFLASAFELFGCKQRMLEHGNRDDVPVTLGTALGLLWGAAFEKEEGKLKRVWVIGPVFHRDVTMRGIEDGLKYYSKLEISVAWTIQLYKALEKVSTLQNTIIYRYLLMMHYCLTGQRLELSCVNSSAAQEERLESSAIPHDRYKIWMAEQGMLQMVRTGDMNYKQALSNCMSISAGVPVQSSDVLRQSKTSIIVFTSLVCRAAIEGGLSPEEAYSLGDSYIQTAEAAKSLDELAPLAMMMYDDFIRRVHKHRTNPNLSRQIQKCVDYIEMNLDKKIVAEDLAALVGYTEYYLTHKFKEETGLSVTNYVKFAKVERAKVLLKSTPLSVREISEQLGFATRNYFSAVFQQVTGKTPMEFRETMGILDIEIVKGFMRMCNDGWLQDWHERNGGNLTYRMKEEEVAQCRPFFDPQPREWVNMGVQADNLAGEYFITTGSGKFFRNVEPDPVHSIGIVEINDKGDSWRIVWGLEDGAKPTSEFPSHFMNHSVRKAATGGANRVIYHCHATNVIALTYILPLTDRDFTRALWQSATECPVVFPEGVGVCPWMVPGGTDIAMATSELMKTYQAAIWAQHGLFASGPDFDITFGLAHTIEKSAEIYVKVLSMGGGIIRQTITDDDLRAIARDFGVTLNEKFLNMSYAEAKARYAATGVDTEAAIARLKTVPISLHCWQGDDVRGFDTDPTKPLTGGIQTTGNYPGRARTPEELMADMDKVLSFCPGTKKINLHASYAIFDEENPWVDRDKLEPKHFKKWVDFCKARGLGADFNPTFFSHPKCDPLTLASPNEETRKFWVEHGKACIRISQYLAEELGQPCTMNIWTGDGFKDVPADRKGPRDRYKASIDEILSEPYDFKLVKPCIESKVFGIGVEAYTVGSAEFALSYAAFNRKKCIPLMDNGHYHPTEVVSDKIPALLAFFPEIALHITRPIRWDSDHVVLFDDETKEICKEIVRCGGLDGRVNIALDYFDASINRISAWTVGFRNVEKALLSALCTPHTVLKELQDTNQFTELMVRQEELKTLPFGEVWDEYCRRNGVPVDGAWFEEVKKYEQNVLSKRIMHKNYLAIDIGASSGRHIVGWMENGVLRTEEVYRFPNSVQRVDSHLEWDIDSLFANVKQGIREAFAKYPNIESLSIDTWAVDYVLLKDGKPLSPVYAYRDSRTQAVLPEVHSILPFAQLYARTGIQFQPFNSIYQLYADKKAGRLAQAEDFLMIPEYLLWKLCGVKAREYTNATSTGLVNAQTGEYDPEIFKALGLPEAMFPKLTAPGTVLGPLKADIAAEVGGQTKVVLCATHDTASAVEGIPMEQGDAPFLSSGTWSLLGVKLAKPITNPESCRANFTNEGGVGYIRYLKNIMGLWIIQCVQKQLGISFAEMVELAKTSTYTRIFDVNAARFSAPQDMRAEIRAALAETGEAPATDADLINSVYHSLAYCYGEAFRELEALTGQHWDKLYIAGGGAKNATLNELTAHYTGKQVVALPIEATAIGNLKIQMSISEGGTVMLTYNMDVTPESVWKRTTPSEAELAQPYYCTEAGVFYAQQHFSTARTDKESYLLFYTLRGAGLIEQGESHVVLSTGQALLLNCRTPQSYCTAPGQSCWHHYWVHLDGAGVAAMEPLLLPGKKLTPVQLTGVKMQEYFEMLLGQMEHSTVDSMVQIGLALHGMLALCAQSSLAEAETTSARQVILQAVETIRKHYQQELCLADLLAEAHMSKSYFLRLFRRYMGTTPYNYLVNFRITQAKELLVLTDHSVSEIAQEVGFGDASNFSTRFAKATGQSPLQYRKSALKPQEGTRMNIKERAAQAAAWKAAGQCNCAQAVLKAFEDKLPVDADTLMKLGAGYAAGMGCMESTCGALIGAVMVAGVVTDGKGTPRISKELLQNFQEKCGATICKDLKGVETGAPLCPCPECVRNAVLALGEVLGEMKKVLFVCHGNICRSPMAEFVMKDLVEKAGLSAQFEIASAATSTEEIGNPVYPPARCKLAEHGISCAGKTARQMTRRDYETYDYLIAMDHNNLRNMARFVGGDPEHKVSLLMDHTRRPGDVADPWYTGDFEATWQDVLEGCTALLEELRMCWRVAPPCWKNCDKKGKATTERYCEGERFTGLSFAGEAFESCDFADCVFVDCSFSKCELDHTTLNECRFVRCEITGLRSVSSSVQSLDFEDCRLQEIEWASLLSNGAFPDPIHTLKDCSLKYNTFTEMNFNRFDFSNGNEIVGSMFAKCEMQLASFKGTELHETEFYQCDLRKADFRDATGYKVDILGSRMKDARFSLPEAVNLLADLKIKLSMKIAQILKKISVVLPKAAGIGKVFFRLALVGVSGLFPMATMKDIIQSPLLLALVIGGLLYISAFSLVYLKKAYDHCLELGITRKELSNVIKSSLIFSVVPSLSIVVGLFVLIAVLGSVWAWWRLSVIGSLSYETMISSSIAQVLGYASSAEMLESATGRQFGVVMILMSVGMLSGFLILLPLGKKLCKSVDRSAAENGGSTWKNVLSGVFMLVMFSVYIPILLFTDNGSPVLMIAIGAGVLAKRPGLAWLNNFVMAFSMLGGLISSLAWVRIFGMSKAKTETKMDSFQSWAHRWGRVGTLIALIYMVALPFVVLAAYDSIPSLGEVFNVNTFSILLIYIPVGFSEALSYTPILGCSAYLAFITGNIMNLKLPVAANAMNLTKKQPNTPEGEAIASVAVAVSSLMTVAILTLAAVCASFISPVFELPAVKTASGYLLPALFGSMALGLFASSSSGSKVVKGGIKGVLPVLIIMTVLSLAARLAGYGSVLGGLVGIFIIVMLPIGILTSYVLWKKGKIQVVDKEQKMIQFGLRLHDAEKLPIEQVLPLVRQKGFSCVHLALSKSLKEVPNTPSALTPGYAAYLRRLFAKNELDIAVLGNYLNLAHPDTAALHAIQEKYYAHIRFASLLGCGMVGTETGAPNAEYKFCPECRSDAALATFITNFKPVVRCAEQYGVTIAIEPVVRHIVYDARRARTVLDEIGSPNLQILLDPVNLLNMENVDQREEVFAETIELLGKDVAMIHFKDFLLQDADGQLAATGAGQGGMGDYRTILRFAKEQKPYVFATLENTTPENAVQCLQYLQKQYDECMVPPLIWVRFYHYTPKLFAGEHLKRLLALLIVAPGSTMADRIVLNTISYHGHGAIENIVPELTARGYKKAFVCSDPDLIKFGVTKKVTDLLDAANFAYAVYSEIKPNPTIANVQDGVAAFKAAEADCIVTIGGGSSMDTAKAIGIIINNPEFADVRSLEGVAPTKKHAVFTIAVPTTAGTAAEVTINYVITDVEKKRKFVCVDTNDIPEIAVVDPDMMSSMPKGLTAATGMDALTHAIEGYITKGHCVISDMFHLEAIKLISQSLRGAVQNTPEGREGMALGQYIAGMGFSNVGLGIVHSMAHGLSALYDTPHGVACAILLPVGLEYNKSVAGERYRAVGKAMGVMGIDEMNDVEAADATIAAVKQLSADVGIPTNLNGILKEEDIQFLAESAYADACRPGNPRDTSVEEIVELYKSQLMTLNFYTLGVLYLVYSFLGWVGETVVATFRGRRFANRGMAAGPFCFVYGTTAILMAVGFADMRTKPVVLFVACMLTATVVEWLTAKLLERLHNRKWWDYSDKKFNLNGYVCLQYSVLWGALGMVTVLWGNGLLLRLCALVPDWLLHPLVWVALGIAALDQLGSAVLVGRYAAQHPVLEQLNQKLEARSDTLRRRIAVYVEKRIQRAYPEAARQQPTAAQKGQADFLSAADLLWLFVIGAFLGDMVETVFCRLTAGVWMSRSSLVWGPFSVVWGLALAMATVLLRQNQDKSDRYLFAFGTVLGGVYEYVCSAVTELLFGTVFWDYSKFKFNLGGRINLLYCFFWGIAAVLWMRYGYPLVLKLMKKVRSHIRPWMTAALAVFMAVNMLTSALALARYDARTSGEAPNGQLEVFLDEHFDNARMERIYPNAKKVIKAEMLIPVLLFIVGLLCLIKGGDWFVDGATGIARRFHVPELLIGATVVSIGTTLPEVMVSTTSALTGHGEIAYGNAIGSVICNSALIAAITIAVRPGKVDPKSLRTPVAFFFVAAAFYAGVAYTTGSFTRPVGLILLAMFVAYIVCNVLAMKNTPAPEEEEQAEEGPFAKELGLLVIGAVLIAVGADLLVDNGTLIAQALGVPESVIALTFVALGTSLPELVTAITSLAKGHGALSLGNVIGANVFNLVLVSGVSVTLAPFSIPQNSTIAGMNASLVMDIPVMFAVMLLLTVPALIKGKLSRPQGIALLCIYAAFCAVQFSIMENVILQPIEVGGQTFKNRIMFPPLTTGYEKNGMISEQDMGFYTRLAKGGVGYIVMGDVAPINSFSPTPKLFDDSQIPAFKALADSVHAYGTKLGVQIFHPEYDVDAINSLFMQKKFDEMRQRLHHDMMFFTDEASEEMLMSIIDKMCACAVRAQKAGVDVIQIHGDRLNGCLCSTRMNHRTDKFGGSLENRVRFARMLTRAIRKAVPDMVIDYKLSIVTPQRGKGGIDEADAVQFAQWLVEDGVDMFHVAQANHTGNMADTIPPMGVQPYGFFVKIAGDIKKAVNVPVSAVGRIVDADMAARVIESGMADIVAMGRPLLADPDWGTKIAAGKACDIRRCISCNKGCTDAIQNRQFLSCVLNAENGYENTRSIQPAAQKKKIAVLGGGPAGLEAARVAALRGHDVTLFEKTTTLGGQLNIACVPPRKEEMRRATQDLIHAVCNAGVHLCMGQTRTAEQLKDAGFEAVINAVGAHSAAPRIPGIDSVNVADAWKVLAGEQQVYGTVAVIGGGMVGCETAEYLAARGCKVSVIEMMDKIAAGESTTILPTLLENYKTYGVEQYPSHKVKEFRMDAVVCENKDGAEVTIPCDYIVLAMGARSNAFDAAALEAAGIPVYSIGDAAGKAADISNAIRTGYDTACQLMKILQVQFKNRNGHTLRGIVTLPDTEGKVPFVVHLHGFAGSCSGYKSMYTHLSRALAAQGIGSARFDFYGNGESDGEFEDMSFDGLHTDAQDIFAWAAEQPYVDSEKLFLSGQSMGGYIAASCAPVIQPHGLILLCPGAGMWFGCAQRADGVVQTGKDYTDLEGLCYKMAFNYEMAKHPDPFTEAKGYNGPVLLLRADDDRLVDEGTCSRYAQVYTAPEVDTIAGGGHNFATLAARAVVEEKTAAFIKANLMDQKKTVRPFSMKDKIGYTLGDLGCCFTEQYRAMYLSIFYTLILQVNPFHVGILLLVTKIWDAVNDPIIGAIVDSRKATKGGKFIPWIRAFSFPMAVLCILGFVNVGNINYGLRLAYMFVTYVLYEALYTCVNVPFGTLSSVMTDDVSQRTALSRYRSLGGTIFMTVMVMIGPLFLYVDNKPVAGRFLMLACICALLGLLCLQITCVWCKERVEVPERPQGEKLNYLHVLKEISHNKALLGVMFFSLTGMIGASVVNGLNTYLYKDFFGNVKIQAVSGMLSVLYAVLSFAITQPLANKFGKKEWCCMGAGFAAIVFGILFFFPVHNPVAFIVINGICYLGASGMQVLIWAMVNDAIDYHELQTGERNEGIVYSTYSFFRKLASAISGSLSSFVLGAIGYNVTAGAVQTAGVVNAIWKSYTGVYFLGYGIAVAILFFVYPLTKQKTAEMLTELKTRRAAKESKMVNYTVKRYFFEQSAVREFYSGAYYDLFLVMRGSGVFRCSEVVLPAQQQNLIIFKPGQGGRLEYAGAYGPLELIRVQLSPQTLAQLSDADTDLEKSFNVVPFRQVAVRPDSQIYMLLKNLARKLLMLPQERTQFGAAVFEHGILQMFVVLALRACIHAEFHTASVSRHHLMLDEVFLFIQAHLTEELTLERLEKEFFVSREHIAREFKRQTGQTVHRYIVKARLDRCCTLIEQGLPITEVYKTSGFGGYNHFFRAFKKEYGMTPKEYFSTTRQDARGMLHLSSWMTTLPMMLIGMTGILLVIGFLVLVVMALNCLTRRKMNFWNTFAALFSNFGALTWQMVVMWGIGALLIYLAIVKKMEPSLLLPMGFGAILVNLPASGAITQGDTVGPISALFEAGMSNELFPLLLFIGIGAMIDFGPLLEKPWLMLFGAAAQFGIFFTLFLAGFFFDMKDAASIAVIGAADGPTAIFVANTLKSQYLGAIMVAAYSYMALVPIVQPPVIRLLTTQKERRIRMPYEKGNVTQLTKILFPVVVTVVAGLVAPASVALVGFLMFGNLLRECGVLNSLSETAQNVLANLITLLLGLTVAGQMTADKFVRPDTLLIMALGLVAFIFDTAGGVLFAKLLNLFLPEGKKLNPMIGAAGISAFPMSGRVVNKMGLAEDNQNFLLMYSISVNVSGQIASVLAGGLILSLMAMQRPAGKSLDRRAALYSPLSFLLIPETAASVKGENAVLRKNSTVMGIVVIGAVFVDIKGYPLSTYIPGGRNAGRIEQVHGGVSRNVVEDIANVELRPTFVGLVDDTGMGQDVIDKLARHKVNTRFIQKKPDGMGTWLAIFDNDGDVHAAISKRPDTTPLTGLLQEQGDEIFADCDSIALELDLEKETVKQTLRYAKKYGKKVFAVVSNMSIAMERRDFLQQIDCFICNQQEAGLLFSDDYDHLSPDEMCRVLTGNVRSANIPSMVVTMGGQGAVYACADGSCGIVPAKKVDVMDTTGAGDAFFAGTVIGLTYGKTLAESCEIGSRLAASVICITENVCPRFRPQEFGLDVPVVDMDFYGTIGPACADVKLLQQMVEAGMTGIRMNLSHGPLAAHKDWLALLRKAGVKKLLIDLQGPELRIGRLPQPLSLAAGQTVRLGAQGIPCPAALVQGVQPGQELLLDDGKLLARVDTAEPEALVCTVVRGGVLQSRKSLAAPGADIQMPTLTTEDKENLAIAAGCGVTGVMLPFVRGAADIRNLRQALAEAGAPGLKILAKIENLAGVQALPEFLPLVDEVVIARGDLGNAMPLWELPRCQKQLSAACRAAGVPFMVVTQMLDSMHTRAVPTRAEVSDIYNAVLDGASSLMLTGETAAGQYPVQAMEYLVRTARTAMMKWMIASDLHGSYYYAQQLQQTFEREQADRLLFLGDLLYHGPRNDLPRDYAPKKVIPLLNSLAPKLLCVRGNCDAEVDQMVLNFPVLADYAVLPVGQRLVYVTHGHVFNLNHLPPLAPGDILLHGHTHVPAWTDFGQGNLYLNPGSVSIPKENTAHSYMTLEGSTACWKTMEGACYHQLQLMAKSSNVAVKIHTVFMIAAAVRDMQPAHLRAATLAEYHILSGVSRGFGAKVMNETFMKEKPVLPLLLSMALPNVVSMLVNSLYNIVDSLFVARISEDAMTALSLVFPIQNFSNAIAIGFGIGINAMIALYLGAGDREKAETAATHGFVLSLVHGVVMMVVSITIMPGFLRRFTQDETLIAAGITYSTIVFLFLVVNMVSLAFEKIFQAVGRMKVSMVALITGCVCNILLDPVLIFGLGPVPAMGIAGAALATGIGQVLSVVVYLVVYLRTELPVRLRRSCLRPDAALDGRLYAIGIPAILNLALPSLLVTFLNGLLAAFSQSYVVVLGIYYKLQTFLYLPANGFVQGMRPLIGYNYGAREHARVKKLFQLTLLMSAAIMAAGTVICQVASGQLMGLFTQNPETIAAGQTALRIISIGFVISAVSTTVSGALEGLGKGTESLVISLCRYVVFIMPLAALLCNWLGADGAWHAFWLTEVLAAVVSGIVYRRAVTHKKMIETIAAVNQAVNSFIWGIPAMVCIIGVGLLLSVRTGFLQIRKFPYAIRTTVGRMFRKRDASDGAMTPFQAVCTALAGTVGTGNIAGVAGAIAIGGPGAVFWMWCSALLGMCTKFAEVTLAVHFRERSDTGEWVGGPMYYIKNGLGHRWQFLAVLYALFGVLTVFGTGNATQVNTIVAAVDTALLEYGLVGGSFLPTLNLIVGILVAVLVALVLLGGIKRIGSVSEKLVPFMALFYIVLSVGVVVLNFSRLPYVLESIVAGAFNPAAFTGGTIGSLFVSMQKGVSRGIFSNEAGLGTGSIAHACADTKKPVKQGMFGIFEVFADTIVICTLTALVILCSGTQVSYGAAAGAELTISGFTTTYGGWASIFTAVALCCFAFSTIIGWGLYGSRFLVFLCKSNKVARPFFVVYALVAILGATMDLGLLWSIADTFNGLMSIPNLIALLLLSGTVVQLTRAFFKSEGMENFNELLQKYADFIVRVGVNPQPGQTLIINCPLEGAPLARLCVRSAYEAGARDVQVNWQDDAVTRIRMELGSEDALTDHKGWQLRRYLDYAESEGGVCVLHLIADDPELFAGLDGAKISRVNSANRSFMQPWREYTMNDRVQWSIAALPAEPWAKKMFPELDTAAAIEAQWKLIFDTCRVTGGDPVGEWQKHLDRLNELGAKMNALDLESVHFESANGTDLTVGLAEQAVWESAGSKNEKGVPFLPNIPTEEVFTAPHKDKVDGIVYGTKPYVFNGQLIKNFHVTFKDGKVVEHGADEGADLLGQLLDTDEGARHIGEVALVPASSPINRSGKLFYNTLFDENAACHIAFGDSYPGTTVGGTGLSKEELAARGMNHSSLHEDVMIGAEDSRITGKCRDGRTVPLFENGVWVLMAKQSGGNTAQRVEALVRPTVEGMGLRLWDVVFEKEGPDWYLRILIDRDGTMDTDTCAEVSHALDPILDEADPIDQSYYLEVGSPGLGRKLTRPEHYEALKGQKVRAKLIRPNADGVRELSGILTGREGSTVTLETENGPVTFEVNAASGVQLCDDEDLFNMTAANKDFFEALSMLEHERGITAEYLIEKIKAAIIIAVKKNYEVEEDHIRVDIDPDTGRFDVALIQDIVADEDWYDEHAEIGVTEARKIRSSYEVGDRIITPLKTRDFGRIAAQTAKHVIRQGIREAERNQQLSEIQSRAHDIVQATVTRVDTEKGIVALDLGKGGEAVLPRNEQVPGEVYTEGETLQVYIVDVVSTERGPRVMISRTHPGLVKRLFELEVPEIFDGTVEVKAISREAGARTKMAVWSKDPNVNPVSACIGEHGARVAAVVEKLGGEKIDIVKWSEDISEFISAALSPAKVVKVELLPGETRSCRVTVPDQQLSLAIGNKGQNARLCARLTGYNIDIRPESGYYGEDEEPKKDAADAEMAQKKIPARQCIGCMTSRPKKELVRVVRAPSGEISIDLVGKKPGRGAYLCPDPDCLTKAKKKKALERCFEQPVPAEVYDALAVQLAAAAKEAAADGKKEMAKKNNAPAKPKLPPEEALYQAVSLCRKAGALTMGFDAVEEACVKSKAWLVMTASDISPKTLQRLNYAVGDLVDVFTMPLTQDKLADISHKPVAVYAVTDRNLAKLCFDRLSDCGAIKNEEDMSEMIVKYKVSDFAKDLNLSAKKVLDELAAMGSTGKKNSSNLEENELNYLLEKFSKDNSVANLDEFLNSAKAPKEEPKAEKKADQKAEKKAEKKPEAPKVDKKPQQPAAKAEQPKANNNNNNGKHGDKKPEQHKKREEKTVSFSELARETGAKATAAPAQAVSVRREDNQVTVDTRTVDMNVDRFDARYDDLASTKNTENRRKPTPQGNKQKFTQRGQRQRQQFQKGKRETEFERLQRIQLEKARNAQLKVMIPDEITVGELAARLKQQAGKVIAKFMQMGEMHAINDVIDFDTAALLAEEFHAKVEHEVHVTIEERLFTQEEDSQEDLVERPPVVCVMGHVDHGKTSILDAIRKTNVTAGEAGGITQAIGAYQVKVNDSLITFLDTPGHEAFTSMRARGANMTDIAVLVVAADDGIMPQTIESINHAKAANVKIIVAMNKMDKPTANPERVMEGLTKYGIITEDWGGDVACIPVSALTGMGINDLLERIALEAEVMELKANPNRRAKGAVVEARLDKGQGPIATILVQNGTLHSGDVIIAGTAVGRVRTMRSDKGQLLTDAGPSTPVEITGLTAVPEAGDLFEAVEDERLARELAEQRIAAAKEKQFSSFQKVTLDNLFSQMAQNDMKELAIVVKADVQGSAEAVKQSLEKISNDEVRVRVIHAGVGAISKSDVDLADASNAIIIGFNVRPDNVAKEEAAATKVEMRMYRVIYDAINDVTDAMKGMLAPKFREVSLGELQVRQVYKISNVGTVAGCRVTSGKITRDSKVRVVRDGIVIAEDEIASLKRFKDDAKEVAEGYECGVTLEKFADVKEGDVYEAFKMEEYRDMSQKNMGRLAQDMKREVIAIIGRLKDPRLEGGLLTVTRLDVTPDLDVAKVYVSVMGRADGPKPAIEALNRAAGHVRTEVSKKMHIRKAPRFIFVEDDGAAYAAHINELLRSLNVNGEEEAQPADTEQTEDMTEQLDVQQMAQRLLAADNILILCHKNPDGDTIGCGSALYYALKALEKTTAVLCSDAIPSRYAFTNPRLFKGEFEPRTVIAVDVAGLQLFGENNGVPQFARHVDLCIDHHAGNNGYADFTLLDAGAAAAAELLYQVIVEMGVTITPHIADCLYTGVATDTGCFKFSSTTANTHTVAAKLIEAGCHVEELNTLLFDTKPRARMEAERIARNHLEYYLDGRCALIYLTRDEIRQSGVDPADLEELTSLPISIEGVKVGLTLRQQPGGSYRISVRTAKSVDACAIARRLGGGGHTRAAGCELLGDLENAKNAILAEVEAELDAPQEEAMQGILIVDKPMDWTSFDVVAKLRGVLGTRKLGHSGTLDPMATGVLPVFCGGASKAVDLQLNHDKTYRATLRLGARTDTGDSTGTVLETAPVTAGEKELLAVLPQFIGPQMQVPPMYSAVKINGQPLYKLAREGVTVERKARPIEIYGIEYGGSPEENEYVLTVRCSKGTYIRTLLEEIATAMGQKGTMSALRRTAAGLYTEADAHTLEEILAAKEQGNAALEALMLPVESVFTPLPLLMVEPWVEQHLYNGCPTSRYPAADGRYRVRNAAGQFLGLANITGGVLRVEKLFVERNMQIISQFAPLPLARPEKGTAVAMGYFDGIHIGHRAVIEGAVQWAKTHDAAPAVFTFRLPVENKMKGKRLLSTEDKHALIHSLGVEYYLTPDFEAIKALSPEEFVRGIVENCHARALFCGENFTFGAKAAGTPELLRTLCAPLGVEVVVVPMAQFEEKPVSSTRIRTALEGGDIPAANAMLGMPYAIRFAVQHGAGLGHTLGVPTINQLYPQGFQMPRSGIYITRTCINGVWYPSATGLGSRPTVNDDATKVTCETFIPGFSGNLYGTDPVVEFHAYLSPSKKFDTLDQLRDCINDAARRAQEYFAMGLGKKTIDDQNYCGKKVLVRCDFNVPMKDGVITNENRINAALPTIQKLVNDGAKVILCSHLGKPKNGPEAKFSLAPVAVALSAKLGKTVVFADDDNVVGENAKAAVAAMNNGDVVLLQNTRFRKEETKNMPEFSEELASLADAYVDDAFGSCHRAHCSTAGVTDYIKDTAVGYLMEKEIKYLGNAVNDPVRPFTAILGGAKVADKLNVISNLLEKVDTLIIGGGMAYTFVKAQGYEVGKSLCDDTKLDYCKEMMAKAKEKGVKLLLPVDAVCIKDFPDPIDAPVDVTVVPVTAIPADMEGCDIGPETMKLFADAVKASKTVVWNGPMGVFENPTLAAGTLAVAKAMAESDATTVIGGGDSAAAVQQMGLGDKMTHISTGGGASLEYLEGKELPGIAVIQNAMDKAKRKAIIAGNWKMNKTASEAAVLVDELIPAVKDATCEVVICTPFTDLVTAVAKTKGTNIHVGAENVHFEKSGAFTGEISADMLVDLGVEYVIVGHSERRQYFAETDQTVNKRTLAALNAGLKVILCVGESLQQREEGVTEELVRMQTKIALRDVTAEQMENVVIAYEPVWAIGTGKTATSDQAEEVCAQIRKVVGELYGEAVAEATTVQYGGSMNAKNCEELLSKKDVDGGLIGGASLKAPDFAVIVNAATKGMNLSRVAGKAKRPACGSAACGVHNTRAAAVKTDQRPAQRMAKKPVLLCIMDGFGWVPNETFGNAVVAAKTPHLDALMAKYPMTTIDASGMAVGLPDGQMGNSEVGHTNMGAGRIVYQQLTLITKSIHDGEMLKNPVLVKNMKAAIEAGKAIHLMGLVGTGGVHSHADHWFGVLEMAKHLGAKEVYLHCITDGRDTDPHSGKGFLADLQAKLDELGVGKIASVSGRYYAMDRDNNWDREEKAYAAFVYGEGEHAANAAEAIEASYAADKTDEFVLPCVTCEGGRVQDGDTVIFMNFRPDRARQMTRIFCDDAFTGFERRGGRKQVHYVCMAEYDATMPNCEVAYPPVELKNVLGEYLSAHGKTQLRIAETEKYAHVTFFFNGGVEAPYEGEDRCVIPSPKVATYDLKPEMSAPEVAAECVKRIESGKYDVVILNFANCDMVGHTGVFEAAVKAVEAVDTCVDQVVTAVLNAGGCAFITADHGNAEKMMNPDGTPFTAHTTNVVPFVAVGCGDVKLREGGCLADIAPTMLPYIGLPVPAEMTGKSIIVEMKSRITRMTAALLAAVLSLSLLVGCKPKKELTRYTTIFYDVFDTVTQVIAYCESEEEFNTQMQALHQDLIAYNQLYDIYNDYDGVVNVKTINENAGKAPVQVDDRILSMLELARQMYDLTGGKINIAMGSVLGIWHDYREAAEQNASEADNTLPTQEELEAAAQHCDINDLVIDEEAKTVYLSDPEMSLDVGSVGKGYAVEMVCRAAEARGLTSALVSVGGNLRAIGTKPDGSQWTGGVENPWNASEVYTNTNSIFGSPINMSDLALVTSGDYQRYFVVDGKRYHHIIDPDTLWPAAYYNGVTVLCPDSGMADCLTTALFCMPLEEGQKLVESLDGVEAMWCTPDKQATTSSGWDSHLKKMYFEKTLPKEVLKMKAHIARNQNAGVPLALGWNLSPADRGKLEGMAPAFGMKLLPIAPADAGKTVAQLLGEVEVKAPRTLVLEPGAYPPALVLANFRDKDVDTLLDLMRQAQVTIPLKAVVTPANRNWMFADLLAHLQEEHTAFTAAKESQTVMIIVLKQNAPDVQVREFCHELEDMGLQINDSKGSDTHILGLIGDTKAIAESWVLANPVVETCRRVSEPYKKANRKFHPDDSVIDVEGVKIGGGNFAVIAGPCSIESEEQITYCAQRVKAAGASLLRGGAFKPRTSPYSFQGMRSEGLDLLKLARRATGSPIVTEIMNTEHLPLFENVDLIQVGARNMQNFELLKAVGRQKKPVLLKRGLANTLEEFVMSAEYIMAEGNENVILCERGIRTFETSMRNTLDLAGVVMLHKMTHLPVVVDPSHACGHAWMVPELAKAAVAAGADGLMIEVHNNPAKAKCDGAQSLTPDQFDALMQFIGKEVEFFGKKMNMESSKKLDLWVRSHCTTMTARVLFFFILPLFLKKFKISLDFSFMKMGKEAKTNAMRILEREKVAYTAHEYPHEEGVAVDGVTVAASIGEDPACVYKTLVTQGSSKNYFVFVIPVAAELDLKAAARSVGEKSVAMIHVADINKVTGYVRGGCSPVGMKKQYRTVFDESVLTQQKVYVSGGRIGTQVCCAPADLIRAARAATAKIIFMVRKVAVIMGSDSDWPVVKGACAQLKALDIPFEAHILSAHRTPAEAAAFAKSAKANGFGVILCAAGMAAHLAGAFAANTTLPVIGIPMKGGAMDGLDALLATVQMPSGIPVATVALNGAKNAAWLAAEILALSDDALAEKLEAERVSMAQQIAAKEEKLQNELNELMSDFAYPLHEECGVFGIYDRAGTEDVAAAAYSALYALQHRGQESCGIAVNDDGVITGHRDLGLVNEVFTPEVLANLSTTTAHMATGHVRYATAGTRVRANAQPMIVRHGRGTMALCHNGNLTNAVELRRQLENEGAIFHGSSDTEVICYLITRNRLRMGSIETAISKTMDVLEGAYSLVIMSATKLIAVRDPRGYRPLCIGTLPGGGYVFASESCALDATGASLLRDVEPGEIVVVDTKTGELRSIKDHCGRPDTQMCVFEFIYFARPDSVIEGSSVHEARKQAGRFLAQEHPVEADVVIGVPDSGLDAALGYSQESGIPYGIGFIKNKYIGRTFIQGSQKQRENSVRIKLNVVSSTVKGKRVVLVDDSIVRGTTSARIIKLLRDAGAAEVHFMVSAPPFKYPCYFGTDIPDQKLLVATGRTLEQINEVIGADTLGYLSNEHVVQLAKNAKCGFCTACFTGEYAVEPESVLSTDIHDRHLNDRPKDAKKLGEMEKSYSESYAAAGVDITAGYRSVELMKQYVARTMNEHCIGGLGGFGGLFELDCTGYKHPVLISGTDGVGTKLKVAMIMDKHDTIGIDCVAMCVNDVICAGAKPLVFLDYIACGRNVPEKIANIVKGVAEGCVQADCALVGGETAEHPGMMPEDEYDLAGFTVGVVDKEKILNNETMAAGDVILALPSTGVHSNGFSLVRKVFNIDADPDVLFSTPAELGGKTLGEALLAPTKIYVKPVLKVLEEVQVKGISHITGGGFYENIPRSLKKGCCARINKADVRTPALFHLMQKVGGISEHDMFNTFNMGVGMVLTVPAEQADKALEILHANGEPEAYRLGVIAEGEGVELCMLNIAVLVSGGGTNLQALLDSETRGENPNGKITLVVASKPGVFALERAAKAGVEGCVVRRKDYAASEEFDAALLETLRAHKIDLVVLAGFLSVLGPSVIAAYPRRILNVHPALIPSFCGPGMYGLRPHEAALARGCKVTGATVHFVNEECDGGPILLQKAVDILPGDTPEVLQKRVMEQAEWKLLPKAVAMVCSGEICMEKINLNEYLASNEYPGRGIAVAMAPDGRQMFIGYFIMGRSENSRNRVFDPVPERGGICTVAADPAKLEDSSLIIYNPVLTLGKTHIVTNGDQTDTIYDLMSQGKSFADALRTRTFEPDGPNYTPRISAVVYADGSYQMSILKSADGNGDSVQRYFFDYPQPVAGEGHFISTYKHNGNPIPSFEGEPLRFACPCTIGDFAHDMWSSLNLDNKVSLFARVIDLDTGESGDMIFNKYDPVCSDFDDPEEPELLPEELELLKKLDAEEEMNELALKYGCNPNQKPSRIYMEDGSDLPVTVLNGKPGYINFLDALNSIQLVKELKTACGLPAAASFKHVSPAGAALGLPLTEVERRMYHIAPETELSPLACAYARARGADRMSSFGDWIALSDICDVPTAKLIQHEVSDGIIAPGYEPEALAILSSKKKGNYNVVAIDPAYQPAPIEHKQVYGITFEQGRNELVINADTMLNNWVTENKSVTEEQKRDLIIALITLKYTQSNSVCYTYNGQTIGVGAGQQSRIHCTRLAGQKADNWQLRHMDKVLNLPFRDDVAKPNRDNAIDVYIGDTPEDVIGDDVWAETFTRQPEPLTAEEKKAYLSKVTGVCLGSDAFFPFGDNIERARRSGVTAIVQPGGSIRDQQVIDTCNKYGIAMAFCGLRLFHHMAEKILVVGGGGREHAIIKALKKSPDCGEIWCAPGNGGISYDAKCKNIKATDVDTMVGFAVEEKFDYVVVAQDDPLALGMVDALAKVGISAFGPDKAAARIEASKVFSKDLMKKYGIPTAKYETFDDPAKVMDYIRAEGKYPVVIKADGLALGKGVLICENEQQAADGVKEIMLDKKFGASGNHVVVEEFLTGPEVSVLSFTDGKVVKPMVSSMDHKRANDHDTGLNTGGMGTIAPNPYYTPEVAAECMEKIFLPTIRAMNAEGCPFKGCLYFGLMLTPDGPKVIEYNCRFGDPETQVVLPLLESDLLHIMQSCTDGTLAQQEVKFSDGAAACVILASGGYPVAYEKGKPISGLVDGQLPDEENVTVYHSGTAITEDGQLVTNGGRVLGVTATGPRLTNALSHAYEAAEKISFEKLHKRSDIGLRALKALAEKQMVYRIYVEKKSGFDVEANGLKNELTSLLGIKDLTGLRLLNRYDVEGIDEALFNQCVSTVFSEPPVDNTYAELPAAEGVSFAVEYLPGQFDQRAASAAECIQLISQGERPLVRSARVYLLEGALTPEQVAEIKKYVINPVEAREASLETKETLKMDYPVPAAVAVLEGFNQLDDAGLAKFIEEKGLAMDLGDIKFCQEYFRTEQRDPTITEIKMIDTYWSDHCRHTTFGTILDDVQIDDAVVQEAFDRYMAMRTELGRENKPRCMMDLATIGAKELKKQGILKNLDESEEINACTVKIKCDVNGKDEDWLFLFKNETHNHPTEIEPFGGAATCIGGAIRDPLSGRSYVYQAMRVTGAGDPLKPVSETMPGKLPQRKLVTTAAAGYSSYGNQIGLATGQVDEIYHPGYVAKRMEIGAVVGATPASHVRRECPAPGDVIVLLGGRTGRDGIGGATGSSKAHKLDSLEHCGAEVQKGNAPIERKLQRLFRREDACKMIKRCNDFGAGGVSVAIGELADGLYIDLNKVTKKYEGLDGTELAISESQERMAVALAPEDVDKFIAIATEENLEATPVAKVTEEKRLNMVWNGVSIVNISREFLNSNGAEKHQNVHVEKGSVWQPQWAGLTFSQKMKSMVGDLNVCSKKGLSERFDSTIGAATVLMPFGGAYQLTPQNAMVAKLPVDGETTTCSGMAWGYNPYLMSANQYVGARMAVIESVTKLVATGFRYEDAYLTFQEYFERLGNKPERWGKPLAALLGALDAQIGLGIASIGGKDSMSGSFEQLDVPPTLVSFATAIGKASRVVSTEFKKPESTVVLVRPIIDPETGCPNFFSLKANYKIVENMIEEGMVASACSVGYGGIAEALFKMGLGNRIGFKMRADMTTHQMFEPMYGSIILEMVSDSPAGMLLGETTKEYTFESCGEKLDMAELQEIWESKLEPVYPYRKAGPAVEKINGSLTAPAAPKIGVAKPKVIIPVFPGTNCEYDTAKAFARAGADPEILVVRNLTPADVAESCEALVKAIDASQIVMLPGGFSGGDEPDGSAKFIASFFRNPAVTEAVRRLLQQRDGLMLGICNGFQALIKLGLVPYGDIRPITACDPTLTFNTIGRHQSMLVHTRVASTGSPWLSKCEVGEMHTIAISHGEGRFVAPQEVLDTMLRNGQVATQYVDLTGVPTMDQSFNPNGSVLAIEGITSPDGRVFGKMGHSERSGEYLYKNVTGDKYQPIFEGGVDYFKVMSQHDRYISPFSTRYASDEMQYIFSDDNKFRTWRRLWVALARAEMDQGLTNITPDMVAELEAHVDDINYEVAIEREKLVRHDVMSHVYAYGQQCPKAAGIIHLGATSCYVGDNTDIIVMRQGLELVRKKLVGVLAKLAHFAKEYKDMPCMAYTHCQPAQPTTVGKRATLWANELVMDLAEIDHRLATLQLRGVKGTTGTQASFMELFKGDADKIRAVDASIAKEMGFDPKAVVPVSGQTYSRKVDAFILNALAGIGQSCMKFATDLRLLANFKEMEEPFEKNQIGSSAMPYKRNPMRCERICALARYLMVDVLNPSFTTGTQWFERTLDDSANKRVAMAEGFLATDAILNIMLNVTDGLVVYPKVVRSRLMAELPFMASENIMMQAVEKGGNRQELHERLRQHAIAAGKQVKEEGLPNDMVDRIAADPAFGLTREEIVAGLVPENFVGRAPQQVEEFIANVLQPIFDADPEDVEQHASLSVMRLDKYLAETAQCTRSEAKTMLAKGRVQVNGAVCKKGDTQLKDTDTVTVDGAPLRYQKFVYLMLNKPEGVVSASTDKRDTTVVDLVGDAYPRRELFPAGRLDKTSTGFVLLTDDGGFAHDILSPRHHVSKTYTVTIDTPLTQEMRTGFAAGVTLADGTALSPAEVTALSPDGCTVRVVLRQGVYHQIKRMFGVYGVGVNALHREAIGGLALDAQLAPGQWRELSDEEVAKITRMILNNLAALQSIFYTKEFTFATDFNKKNNSFLLKLSFGAIFCQKSAFLRGSYRYFTGKLMANRVFQSVIYQMKDAINRVVGVVDETGAVISCSELNLIGEVREGYMAERLTAGDRFVRDGYTYQQFSNAKHNDYAVFVEGADETAGQFAGVLAISLQSIKQYHDEKFDKSNFIKNVVLDNILPGDIYAKARELHFATDVSRVVFIVRVISGGDISAYDVVSSLFPDKQKDFVFNISETDTVLVKEIRKGIDRTDMEKLAASIVDTLSGEHYIKAVVGIGTPIANVKDLATSFKEAQIAMEVSKVFDTEKQIIRYDNLGIARLIYQLPTTVCEMFLREVFKQGSIESLDQETLFTIQRFFENNLNVSETSRGLFVHRNTLVYRLEKIKKLTGLDLREFDDAIVFKVALMVKKYLSNNPAKYMIDFEHVSKEYKKGGRLALEDINFHVDEGEFVFLLGHSGAGKSTLLKLILRETLPTSGKVTVLGKDVAKLRRHKIPYLRRQMGIIFQDFRLIPSMTVYENVAFAMHVLNVPRKEIRPRVEYILELVHLEDKAKCYPDTLSGGEQQRVAVARALVHNPKLVIADEPTGNIDPELSLEMMQLLERVSKMGITVLVVTHEHELVHRFHQRVVTLSHGRIVSDVPADPVAAAEDDLSLDVAAFDADDASAAKKEVAAVMMRPSTFFFLTRRGVRNLGKHWAMTIACIASLSVCMTLNIFASLAEVNVGSMVAYLGSQNETVVYLDPECDDATAAQVGETLSAMPGVSGVQYVSKQDVLDTYRGYMQDYSSLWDEFETDNPFKANYRVTLSDLTQMERMSVKMQAIPGVVSVTAPVEMTNVFVEIQKAVTKGGRMIVMVLMVVSIITVGSTIRLSVFARRREIEIMKYVGATNRMVTLPFFVEGLTMGLISGILTAAVSLGCYSYVVNAAGGLGGIWQMLMGRALVPVANVLPTIVVTSLLSGAIVGGVGSMFSIRKHLNVMSKAMHAKPFRLTGPYTGRHARPESPRSKLIRAVSLGLACVCLLLTATVYPASAATNNTSMASLQTKLDKLSQSINQHKKELSDAKKKESAAKALESELKERVTVLQDQISVLGGQIAAVQNSIGEKEQQIGVMQTQITDKQTQIEQKQNEIDDQWDDFKKHMAAMQELRDGGSVAMLGAVNDLYELLTFNEVMQDISIKDTEIMNNMKSAKQGLEDDKAALEEQKAGLEAEKAELQSQKSELDSQNAQMKGKQSELNNSISAAKLSAAEAQAAQQKAQAAIESDELNYEAVKKEIQKLIAAASASKPQLSFSGFACPLKSYSRISSEYGWRKNPVSGVNKLHAGTDFAAAGGTPIYAAASGYVQVAGWSTGGYGNYVIIYHGKMSDGNTYTTLYAHMRSVATSAGKYVKQGELIGYVGTTGNSTGNHLHLEVWKGGSKANAVNPRSCIPIPHNMNEQKRKRVLRIGCLVLAGVFVLSLLGSIFMMLPLMNRKISLGMAVTIVILAMTVTFSITMLIAMRLFDSTVNSVKEKESMYNKIAEVDRYVRSNDYYTIDEATLYDRLTAGYLLGTGDKYARYYTANAYTELMNIQSGKILGIGVELGIDQTGYAKVTRVYDGSPAQEAGIAVGDYITTVGDTDVKSLSGADAVYKALQGEAGTTVTVTWLDSAAASKTAELTHSGYTSTTVDYQLLDNVGYIRIRQFDGTTPSELDYALRTLTANGAASLVFDLRDNGGGILEDAVNCIDLIAPEGTVAYAEDKNGNRTVIGSSDAESAVSLPMVCLVNGNTASAAELFAATLRTMNGARLVGTTTMGKGTIQSSPQRLSDGSAVVITVAKLVCGDGSCFDGTGLTVDVERALSAEEATNFYDYTPQTDPQVQRAVSAAQQLSGTTTLAGASSAAAADSAASSAAAEDTAPAETAEGEPAEGETAASEPETAASAAEMPELTDLSVIRALCEKYDFALSKGFGQNFIINPGIPTKIVDASGVDKRYGVIEIGPGIGVLTKELAKRAAKVVSIEVDERLPPLLAETMAGVDNFKLVLQDVLKVDLKALIAEEFPGMPVAVCANLPYYITSPIVMKLLGDRLPIESLTVMVQKEAADRLAAVPGTRASSAISCAVNYYATSKLMFTAAPGSFYPAPKVTSAVVRMDIRPTPAVQVEDEAGYFALVRAAFGQRRKTAANAIAGGLNLPKEKVIAAIESAGFDARIRPEALTLEDFAKIQQALGMSAAVWAAEDSASANGWQFKAFGTSSAANVNTLADGADIHGKVALNACTVKEDGTIFPFMPFTNFSAIFHAFDKVSSYPPQNYEKKFLFRPAREDAKKSGTPAHSSQHFTKMNTAAPHALKKRLLTLALSLAFLLTCLPAALAVDLNVDAGFYFKQSRGGTCTLASAAMMLRRRAYFDGLSDWTNVTENSVRSTAWANGLAHSFTYKEMQVGYATLPSGLQSKTAVLISLLEQHPEGIVLYDRTQPHAVLLTDYTNGIFYCSDPAGNIGYGRIPITSSSVSIARASCYWYVTADHNSVAAQADGLRLEGVRYPVNIRTGSGMTLTGTANSATGTTLTSVQVAILDAADQTVQSAAAQANAAAFSLNTLDSQIRFGELPEGSYSYMVLVTDSTGESLCFASDFTVSGSASSTQTYWSVKDAEGTKLQQTVQQMETTVETAAETTVSWFAKLFDMKRSFLLLCTVLLVLGCALPCAAYRLACMALVVQGTAPSAAEAASVTSEESSRGAPSPADTADTVCFTDQSTGQTITLPLRKYLIGAVAAEMPVSWPDEALKAQAVAAHSYALYRRDHSTGENGAWFTADPARRQGCLTDAVLHSYWGTAYAANYARLSALVDAVQTQVLYYEDAPAGTSYFAMSNGRTEASENVWGTALPYLVPVDSSTDTAADNYEYTLNLSAAQLQQLLAERLGIAADLSQQAQWFGTPVLTSSGYVDSLPVCGQTVQGTTLRKALGLRSACFTVVCQSGTFSFTTRGYGHGVGMSQWGAKALAEQGADYRAILAHYYPGTELRRMNFAHAEVATLDPTTMRTLCEEYIANNYIDPETSERLGVKRGLRNPDGTGVLAGLTNVCDVVGYKKDQEGHVIPTPGKLIYRGVNINEIVDEAYRNDRFVFEEVIWLLLFGSLPTREQLDDFCEILAESRALPDGFMDTMNAPSPNIMNKLQRCVLGLYSYDDRAEDLSLENILNQSINLIASMPTMMVNAYQMKRRYYDKQSMFFHLPKPGQSTAEHILSTYRPDQKFTHEEAKLLDMCLLVHADHGGGNCSTFTTRVLSSSGTDTYSAISAAIGALKGPKHGGANLMVNRQLQDILKHVENPEDDDEVREYLRRILRKQAGDGSGLIYGMGHAVYTISDPREVILKQRAKHLAYEKGFEEEYNMLCSIERLAPGIFAEEKGSSKPVCANVDLFSGLIYNMLGISEDLYTPLFAIARVPGWCAHRVEEVIFANRIIRPAYKYLGVRQKYKPIEERMEPLELIIVLLCVLLGLGRGADLAFATDAATGLCTAGAVWWRYLVLGAVVLAAVLAGRSRPLPPEPLRSRRPAAGVLAFAGAVCMLAAGAAQFVLAAGTVSTFVRILLEVACAVWLSNLGRSWLRRDGWKTPTGGLPVAIAGSALFYWNVLMRFMENSSSWHRVQPTAAVWQELAALLLLAALARTLYLPRPENGRALHAAALAAFCLCLCWELPRVLLLLAAGFGGGMAAVLPELLSGLALCCIGGMGLVCAGKEKAGNNMAVRVAINGFGRIGRLAFRQMFDAEGYEVVAINDLTSPKMLAHLLKYDTAQGSFCGKIGEGKHTVESTEDSIIVDGKEIKIYAVKDAKDAPWGELNVDVVLECTGFYTSKEKSMAHIQAGAKKVVISAPAGNDLKTIVYSVNEKTLTAEDQVISAASCTTNCLAPMANTLNKTYPIVSGIMTTVHAYTGDQMILDGPQRKGDLRRARAGAQNIVPNTTGAAKAIGLVIPELNGKLIGSAQRVPVPTGSTTILVAVVKGKDVTKEAINAAMKAAASESFGYNEDQIVSSDVIGMRYGSLFDATQTMVAKIDDDTYQVQVVSWYDNENSYTSQMVRTIKYFAENCMGKYFGTDGFRGEAGIDLTADHAYKVGRFLGWYYNMLRERNGNNEPARIVIGKDTRRSSYMFEYSLVAGLTASGADAYLLHVTTTPSVAYIARVDDFDCGIMISASHNPYYDNGIKLIDCYGEKMPEETLLLVEDYIDGKLHVFDKDWPELPFAHREHIGCTVDYVAGRNRYMGYLISLGIYSFKGIKVGLDCANGASWNIAKSVFDALGADTYVINNKPNGLNINNNAGSTHIEGLQKFVVENGLDVGFAFDGDADRCLCVDEKGNVVTGDHILYIYGCYMKEHGELMNNTVVTTVMSNFGLYKAFDEQGIGYAKTAVGDKYVYEYMAKNGCRIGGEQSGHIIFSKYASTGDGILTSLKMMEVMLAKKLPMSKLAEPLKIYPQVLENVRVTDKKAAQNDPAVQEAVKAVAEALGDTGRILVRESGTEPLVRVMVEAPDHDTCQKYVSQVVEVIKSKGYAVMSEHKTFYITTPIYYPSDKLHIGHSYTTVACDALARFKRMQGYDVMFLTGTDEHGQKIQDKAADAGVTPKEYVDKIVATVKDLWKLLDVSYDRFIRTTDDYHMESCQKIFTKLYEQGDIYKGEYIGHYCKPCESFWTDSQLVDGKCPDCGREVYDAHEEAYFFKTSKYADRLLKLYEENPQFIQPESRKNEMIAFIKQGLQDTCVSRTSVKWGIPVPFDPKHTMYVWVDALSNYISALGYGNDTYHDYDKFWPADLHMVGKEILRFHTILWPAMLMALDLPLPKRVFGHGWLLMNGGKMSKSVGNVVDPVILCDRYGVDAIRYFLLREIPFGNDGMFTNEALINRINSDLANDLGNLLSRTVAMCEKYFGGTVHNVAGTEAIDTELETMVNELTAKVTADMDDLTIPQALMEIFAVIQRANKYIDETAPWALAKDEANKQRLESALYHLCEALRVCGILLNAYLPTTAPKMMEQLGLDASALDLTKTTYGAQQTYTVHKGEALFPRIDVAKEIAHLKEEDEKRKAAAAAANKAKEEAEKKAAAPAEESTVDFTHEEEIDFDTFCKVELRVAEVRACENLKESKKLLHLTVFDGERERCILSGIAKWFKPEDLIGKKLGIVCNLAPRPMLKGKYVSEGMIFAADTADGGCSIAFYGDDTPVGSRIHMSDNTAVRAAKLDKIFGTPVCAVLLAIFCNVLWGSAFPFIKLGYRLFSIDSGNTASIFCFAGVRFMLGSVLVLLGSILLQGKAPRLPRGRVATECCALGLWQTTAQYAFYYIAVAMLTGAFGGILNSTQSFLGVIFAHFIYGNADRMTPAKTLGCAVGFAGVLIGTIGNHGSGSGWGVFCMMAATVIFTLSGPWNKSVTKKADSFAVCFLNLFVGGLALFVLGTVMGGRLHVQSALAAVVMLYLAFICGAGYILWALLMKNNPVSRIAIFGFVNPVVNVLLSAVLNGEPLFRWQYLAALVFVCVGIWLVNKAPAKKEKVMTGPIFDTHAHYSARAFDADRIALLDSLPDKGVVGVCEQATHSGDAPRVLELAHRYPWVVAAIGIHPESLLPAADCGEEGPAPTVSVYGGDWAAEMRALMPYYNDPKVVAVGECGLDYHWPVPKDAQLALFEAEIRLALELDKPIIVHDRQAHADVYALLKKYRPKGIVHCYSGSAEDAVQLAAQGLYIGFGGACTFNGAKRAAKAIEALPLDAIVLETDCPYMAPEPVRGTRCDSSLIRYVGAYIAQRKALAPEEVFRTTAANARRVFGLMKARIPKHREFIINFPDSIDQNKANEGWAKLQQIVEDYKKAHNGASVYAPTFIEDCEPEVKKLQEEYGFEYTVEFVQMQRARLLYQKYGGKILAIGKVAEQPFYDAHSGMSEEEKLQLNVNFITSRRIFAKIDEICLLPRPVDISEFSDFIFVSRQSAITPVVGSDFGRLKALLAIGNKLPPYLLESSAIPLPLQKINAENWLEVTQAYRRLFTLEIQFRRFYVDYFLRVLGDQKKFFSECACHRDGKYTGFADNAVKLGGKWCFVEIKLNVQAEQHLHEQLKKYCHAEWADLREERVLRQERIWQNTMLVMDTTSLYCYDVATDQLDLLVQLDAIRAEEDIRILREELIPRLRMVKHVILWQLKDELSAEEKAAVKAGIKEGLESLSGKIPGLVDIHVNIDALPSSNADLMLDTTFESAEALKGYSTHPAHVAVANSKVRPYYKNRVCLDYEVMEVICAILTALFGIGFGIFMALQPENVIALRSRRRYTQVPEPTEEYIRLTRLEGIVVSVLCAVLLVVLLFAPKMNLNLSTSDWLNAALGVLFLYRGIRDLYNGTGTGWSNEDEKKHFSKLFGIASTIGGAFLLVNIFLPKVEPLHSILMVVTLVFCVALLISHLCYTLSRDDKKMQLAFGWYNIIELLFCLVALWMGIRDLQGKDPPIHTFFNQYDSDPEYRAMWQKKNGVWEIFNAMVLASSQFLGGFPTLSNGVRTITVIVDVIYLILYEIWEHSADMPKTLPERIFFTIVMAAIMVYGMIVYNVALNTNGVTNATFVMALHEMPIMVPVAFVLEFFVVEKLATKLAFLFMRPTDRPQFITYAISLMIVCIMCPVMSLVATLLFKEPSFGMWVHTWGCNMPMALCWQMLYCGPLARAIFRLVFRRGEKQAMMLSKHTGEDTYTFFIYLIYKSYTVRLFLRKYFQKPGECTCKALEKTKKIVQIICFFNLQLCTLYNSFVLSVQCYRVKCRMCTNTLANFVQSYYYTQRKKTKPTKKGEGADSIQAAPSLLFSRCTVFSSRDKKVMNKLTQALMEELTVEYVKVGSLQIPESVVISWVIMLLLVVGSILLTRNLKVDHISKRQAALEALYSLGKNFFEGLLGKEGSRYVPYLMTVALYIACSNVIGVFGVKPPTKDLDVTAALALMSIVLIEYSGVRARGGAGFLKSLAAPTPIMTPMNILEIAIRPTSLCMRLFGNVLGAFVIMELLKLVVPVFVPAVFSLYFDLFDGLIQTYVFVFLTALFMKESIGGEEMSGLVALGAGIAALTGIGGGIGIGIATGKATEAISRQPEASGKIQTNLLLGAALAEGTAIFGFVVALLIILFLGQMLKLDLNLLWTVVDVLILYVLLRKFLFKPIQNVLDQRQKTIEADIAAAQTSKTEAAAALTTAQDKLRNVDNEAAARREAYEKQAEVEKQQLLADAQKQADEIVAAGKAAVEIERQNKLREADAQATALARSMCEKLLKHNLTAQDDDQLLDDLLQKAGAGNGNMATEFSREFFADNRIVKASLRCAHKLREKDLDRIKSEIKKLYDATEVILNITVDESLLSGYVLQVGDRVFDNSGRHQLDKMMEGKPSLATLKTRIEDYKPAETSAEGGVVISSADGIVHIDGMNRAVYGEIVTFENGAKGMVESVEPEQLGVMLFDGAETVGVGTMVTRSGKRAGIPVGDAFLGRVISPLGEPIDGKGPIEAEGYNPIEKQAPSILERQSVDTPLHTGILAIDSMFPIGRGQRELIIGDRQTGKTSIATDAILNQKDKDVLCIYVAIGQKASSIARVAEDLKKHGAMSYTTIVAATASDSAPLQYIAPYAGTALAEYFMAKGKSVLIVYDDLSKHAVAYRAISLLLRRSPGREAYPGDVFYLHSRLLERSCRMRDDLGGGSITALPIVETQAGDVSAYIPTNVISITDGQIFLESALFNAGNRPAVNVGLSVSRVGGAAQTKAMKKANANLRIELAQYKEMESFAQFSSDLDAETRRQLEHGKALMEMLKQPLCQPKSDAEQVVILVLASHGLLDTLPTAEQREKTAAFVRQFRADVSGTMQKIDADGKLEPDRVDAILNAWKAYAGGNDHVVQMSSSKLLKERIESIQDTMKITNAMYLISSSKLRKARQNYQNVSPYFNRMRDTISRVVPHLPEEPEHPFFHERNLENPRRAYLVLTADKGMAGAYNQNLLKFLREHADPNDRFYVIGQVGYRALRHRDPRLVEEFRYSATAPTLQRARDITVDAIDDFKSGKLDEIYIVYTKIQNALTSEPVMERLLPLDRRFLQPAPKGLGDPKGEVELVPDAWTVFEQIAPIYMHGMIFGAMTESFCAEQSARMTAMDSATKSANDMIRDLQLEYNRTRQGSITQEITEIIGGAAAVQDRTMIQGTIIRVAGPVVDVQFTAGRLPALQEALTVTAEGTERTMEVTQHVNETTVRCIMLSASEGLGKGMTVEATGHGLTAPVGEGTLGRMFDPLGRPIDGKGAVDELPHWPIHRKAPGFAEQKPATEILETGIKVIDLLAPYAKGGKIGLFGGAGVGKTVLIQELIHNVATEHGGYSIFTGVGERSREGCDLWGEMNASGVLDKTALVFGQMNEPPGARMRVAETGLTMAEYFREETHKDVLLFIDNIFRFVQAGSEVSALMGRMPSAVGYQPTLANELGALQERITSTKDGSITSVQAVYVPADDLTDPAPATTFAHLDATTVLSRKIVEQGIYPAVDPLASTSRILEADIVGEEHYRVARKVQSILQRYQELQDIIAILGMDELDENDKLTVMRARKLQKFLSQPFAVAENFTGLKGKYVPLKDTVRSFAAIVDGKADDLPEWAFFNVGTLEEAREKAEKKLAEEKGGAVMNKFMLSITASSGEFYQGDCEDLTLPISDGIYGVQAGHNPVLVALHMGILHFVVDGKARDVLVGDGIAEVTPAYVMVLVDSAENPEDIDKNRAEAARIRAEERLQHKQSMHEYYQSKIALDRAMQRLQAAAKYKRMLKRCILAENRKLHASPIWAMFFVLPILSATYGTFNYLQNLEILTDGWYSLWTQHTLFYSMLFFPAMVATYAAYLWRLEHLGHNWNLIMASPVPPLALFAAKFAVVTKLALLTHGFVFALFVFCGKVFAHLPGLPPVTLPLFLLRGLLGALAVIAAQLVLAMVIRSFAVPIFLGLLGGITGIFISSKGHGLLWPYSLMQLGMNSNKSADALAGSYGLFAFSCIFWLGTMFLLAWLLLRREDVRAMAAFRAELQKAHRRHDLALCLLIPGIVVLWVGGLAPADPEELANGYSALLYSLPVIEAILMPVMMAVLASRLWDMEIKGNTAKLLYTLQNRRSLFAGKAVFGVLEVLLVTVLELACVPVLGRVHGYTEAFPTGQLCYLFVCTLAVDTMLFFGEFLLMLWVGNPLPALCVGIVGALVGLFSAFMPPLASYFVPFGYYIPLSAYEVANWDKATHTVTYGTRPFNWGLLAFTLALGAVLFALAWRKVQDEEVMKPVIETHALCKSYHGRPVVDHLNLTVPEGCVYGFLGPNGAGKSTTMKMLLGLVHPTGGSVELLGHTLNEANRIALLRQTGSLIESPSGYLHLTARENLSIVADLKDVDRKDISRVLEIVHLTKDANRKVGQYSLGMKQRLGIAMALLGSPKLLILDEPTNGLDPAGIQEMRSLIASMPQTTGATVLISSHLLGEIEQMVDQVGILNHGKLLFEGSLQQLQKHSRGGILLRVLDAPKAAAVLQQQGVKAAAPADQPDTLQLPPLPDEALAALVCTLAESGVGVVGLTAQTKSLEDIFLSLTQTSGEVAMDTIYDAKLLIVDDNAELLALLCEQLRGAGYGHIRTAQSCAAARACFAAEQPELMILDINLPDGDGFSLFRALRAKADVPALFLSARDADADRLFGLGLGADDYLTKPFLMQELLLRKLAENRGHIVTYDALCAAVWGADYYGYENSLGVHIRHLREKLEAEPGAPQFLRTVRGIGYKLTKGEEAMKTFVRLIRRYVLAAVGIVLLLLFSGVAVLGWLGWQEGCRLPQREYSSSEIADSMVETAEGLAFGAERTPQEWMNGYEWAMVLDDVGNIRWSYGLPQELNHAYTPGDIAKFARWYLADYPVFCWTEPYGLFVIGLPKGSLWKYSIYSSPDFALSMVQVLPAAALGMLLLGLVLCFWLSWRGAKRLETVANGLEALAQGQTVRLPTDGFAGELAEKLNQTGAQLQAKNEMLARRDNARTQWIAGVSHDVRTPLALILGWAEQLEQDALLPDSSRQKATGIRTQCEKLRTLIDDLNLTSKLEYGAQPLRRKDLRAGPLFRQLVAQFCESPLAERCEITLEQEEPAEQTVLSVDEALLARLLENLLNNSVRHNLKPVNITVHTRQVGERFCLTVADDGIGYPPAVLAALNAAEPAENAPHILGLYVVQQIAAAHGGMAVFGQNSPCGAKTTVWLPGRAMKQFTATANDDGVRLSRFVQSVTRDFPTSLLYKSFRNKRVKVNGKKAAPEYRLQAGDLIELYINDEFFPPEGAKPVQKAAPKKQPNQPKVTVIYEDENLAVLYKPTHLLCHSDRTGDANLVDAFTQYLTQKGEYDPHGENRFKPGICNRLDRGTEGLVIAAKNYAALRDMNEIIRTDLLKKEYYTITVGIPQSGRFTAWWEHDEKNNKVSIHAHQSQDERRKQIITDVDVLRTAGPFALCKIGLVTGRTHQIRAHLAYLGKPVLGDIKYGNRKMNERTGTKTQALCAVRISFLDVPEENTLHYLSGKVIKLKDPQILQQFDALDKSKNAMFFPYSTHFAAQTQAFCKNNPDFAPECALTSRPACITIKAMAENKRHKGHRQRMRERVQSYGLDSLAEHEALEYVLYLTNAQKDTNGIAHDLIDRFGDFAAVLEASEEELCTVEGVGPSTARMLHLLPQISRYYGRSRTSTTRCIKTTEQMGSYLMAKFAWSDYERAMLVSLDSRKRVRAAVWLREGTSDRVSLDIKNVVAAAIKGGTDAVVLCHNHPNGVALPSLEDMDATGSIARALGLVNVHLLDHFILTDTEYFSMRDANRLPIYDFKTGTLFWPMAEEKFELVSNYAPTGDQPQAIAQLVEGVQRGDRCQTLLGVTGSGKTFTMANVIAQCNRPTLVLAHNKTLAAQLCTEFRSFFPNNAVEYFVSYYDYYQPEAYIPSTDTYIEKDSAINDEIDRLRHSATAALSERRDVIIVASVSCIYSLGDPIDYRSMVISLRPGMQMERDELCKKLVTLQYERNDVNFVRNKFRVHGDTVDIYLAYMSELAIRVEFFGDEIDRITEFNPLTGSKQNVVKHVAIFPASHYIVSAEKKAAALEKIRAECDAQVKQFTAEGKLIEAQRIAQRTNYDIEMLNEVGICKGIENYSAVLSGRAPGSMPTTLLDYFPEDFLLFVDESHVTLPQVRAMYGGDYARKKTLVEYGFRLPSAFDNRPLKFEEVESKLNQMIFVSATPGEYERRNSSQVAQQVIRPTGLLDPVISVRPVEGQVVDLLGEINARIQRQERVLVTTLTKKMAEDLTDYLTEQGIKVKYMHHEVDTFERMEIIKDLRLGSIDVVVGINLLREGLDLPEVSLVAILDADKEGFLRSETSLIQTIGRAARNAEGMVIMYADVVTDSMERAITETERRRAIQMAYNEEHGIVPKTIVKAIADSIEISDKAENAKRNTRRMGKMEREAAIERLTREMKEAAKLLEFEHAAFLRDQIDRLRRGENPTVDSAAETERKQNHAQTQRKGRKYLGKRMANDKIIIKGAREHNLKNINLTLPREKLIVMTGLSGSGKSSLAFDTIYADGQRRYVESLSSYARMFLGRMDKPDVDEITGLSPAISIDQKTTSHNPRSTVGTVTEIYDYLRLLYARIGVPHCPVCGRVISQQSVDEMVDAVLKLEEGTKFQILAPVVRQRKGTQQKELDAARRAGYARVKIDGNLYDLDEEISLEKNIKHTVEIVVDRLALRKGIRSRLADSLETALALTGGVAEVDVIGGECMTFSQNFACPEHGISISDLSPRLFSFNNPLGACEKCTGLGTFMRVDEDRILPNRSLSIREGAIKASGWYYAEGSVSEMYYLGLGKKYGFTLDTPIKEMSTEAVNALLYGTNGEKIEMHRTNEFGSGVYYNTFEGIVENLERRFRETNSEWMKEEIGSFMSGVECPDCHGQRLKPVVLAVTIGDKNISQFCEMSIRDELEFIKQNEPNLTEKQQQIGGQIMKEIKNRLQFLQSVGLDYLTLARAAGTLSGGESQRIRLTTQIGSALSGVLYVLDEPSIGLHQRDNDKLIATLKNLRDLGNTVIVVEHDEDTMRSADYIVDVGPGAGVHGGEIVAAGSVKDICKAKRSITGDYLSGRKRIAVPQTRRTGNGHCLTVKGARENNLRNIDVSFPLGEFICVTGISGSGKSSLINEILYKTLASELNGARSRAGKCDGVEGLEFVDKVIGIDQQPIGRTPRSNPATYTGVFNDIRTVFSQTQDAKMRGYGPGRFSFNVKGGRCEACEGNGILQIEMHFLPDVYVPCEVCKGARYNRETLEVKYKEKTIADVLNMTVEEAVVFFANQPKIARKLQTLLDVGLGYVTLGQSATTLSGGEAQRVKLANELARRGTGKTVYILDEPTTGLHIADVHRLIEVLQKLVDVGNTVIVIEHNLDLIKCADHIIDLGPEGGSAGGEIVAEGTPEQVAAVPGSFTGQYLRPLLERDRAQRAAEAEKHMMDGYQKDGSPRFKTFYGKTQKEVKLKLKEYQDALISGVQLDTILYFEDWADTWFEGHRDNIAPTTQESYKYCLKMLKEGFYHRPLTVIRPIDIENFLKGMRRDGRSDSYISKARGMLYQIFQKAEANDLVRRNPVRLAEKMRTSGTAKRKEAFTTAEVAHLMKVLPDDRMGLSIRLLLGTGMRMQELLALEPQFIEEDGSVIHIRQAVKVVKGTVSIGSPKSKDSIRDIPVPLNVRPCAIKLRDTTDQFIWESPKTGLPCNPTHFRDVFRKSLEEAGDVRLLTPHSCRHTYVSQMQALGVDIQTIQSIVGHADTEMTEHYLHVQESIRQSAIQLFSEAFSAMRSQFTSYEQLPITLTADHVAAALGISRANAYILLRSDGFPTLHIGKRMVVPKDRFLQWITDSVNGMIGHKDFPSRSGGVEVMVGGLARSLVERGYDVTVYNRGLEKHHNVYDVDGVHARRVFTLQKPALNATIYSFLATFDALFRGYDVIHYHAIGPSVPLLIAKIFGKHTVCTVHGLNWKVDKWRGFASRYMKLGERIAAKYADDLVVLSETEWNYFLQKYGRASILIPNAIRFYEKHACSLIREKYGLARGEYILYVGRISPEKGTLDLVEGYRKAKTGKKLVLVGPLDDSEYCRAVQQQAQNDPNIIMTDYVVGDPLKELYSNCGLFVLPSHTEGLSLSLLEALSIGARCLVSDIPENTVVTDIYGAAFKPEDTDDLARALERECTQEYPDAMRQQQIQYIHTNFEYDVMLDRYEEVYHHVVGDPLKAMPSTLKKGRVPAGAKAMSKETLQHTMRSKVRVFEDGGIRLLRKGQKGLIHAIFSRFGLVLVLLVLQFGALFSLMRWFSNLLPHYLGGTLLVTAAMMVYLLNQDMNNSVRIPWLVVTALAPVLGVLLFCYTKEDVGHRMLKKRLLELEGQTRGQLAQDKKASTALDADCPGAASLAQYLRGRGGGFPVYENTQVTYFPSGEAKFAALLPQLESATQYIFLEYFIIDEGLMWGRILEILARKAAQGVDVRVMYDGTCEFSTLPRDYPRRLEALGIRCKVFAPVTPFVSTHYNYRDHRKILVVDGRVGFTGGVNLADEYINHIEKYGRWKDAAVMLEGEGVRTMTALFLQMWSIQREPEFAQFLTRPLPETQTKGFVTPYGDCPLDGERVGEMVYIDLLNRARHSVHIITPYLILDGELETALRFAAERGVDVHLILPGKPDKWFAYALAKTHYLPLLSSGVKISEWTPGFTHAKVMIMDGQEAVVGTINLDYRSLYHHFENAVWMRGVDCLPRIEADFQDTLAQCRTVEPTRQSVWQGKKLLHLVGIVLKFIAPLIMCYDKGEELLPGGNSPGAAEYIQIYYNPFRPVFPQKPADFVQKEFASMNNLIIGIAGGSGSGKTTLSLRLKERFGEDEVRLISHDSYYKRHDELPFEERCKLNYDHPDAFDNALLIYHLQELKAGRAIDCPVYDYSNHNRSNEVQHIEPAPVLIVEGILPFVEPELCALFDYKIFVDTDADERILRRILRDVKERGRSLDSVIDQYLTTVKPMHEAFVEPSKRNADIIVPNGGENSTAVEMLAHHIRTLIERANRGMTTFHLTVVTPDGCAFEGQAERIVCRAIDGDIAILAKHGDYCTALGMGEAHIVDADGQRRRAACMGGLLSVLDGDVRLVATTWEWAEDIDQARAEASKKRAEEILARKNLNDREYELAQARLKRALVRTSVRMSEKHIGKVIQVIGPVLDIQFKDGELPELLNAIEIDNHGQKLVVEVAQLTGDNVARCIAMSSTDGLVRGTDAVDTGESIKVPVGDQCLGRVFNLLGEPVDNKPAPTPDAYWPIHRPAPSYEEQQSTTEILETGIKVVDLICPYAKGGKIGLFGGAGVGKTVLIQELIYNIATEHNGYSVFTGVGERTREGNDLYGEMTESGVINKTALVYGQMNEPPGARMRVALSGLTMAEYFRDVKNQDVLLFIDNIFRFTQAGSEVSALLGRMPSAVGYQPTLATEMGALQERITSTRKGSITSVQAVYVPADDLTDPAPATTFTHLDATTVLSRDIASQGIYPAVDPLDSTSRILSPEVVGQEHYEIARAVQKVLQRYKELQDIIAIMGMDELSEEDKRTVSRARKVQRFLSQSFHVAEQFTGMPGQYVPLKETLRGFKMILSGECDELPESAFLFAGTIDDVFAKAKKGMAGSMKDIKLRIKSVESTMQITKAMELVASSKMRRAKERVEHSRPYFETLYKTLTEIAAADPRARNPYLRRSEIKRTLLVVIAGDRGLAGGYNANVLKLAAQESGNVEVLPIGKRSAEYFAHHEAELFTQEVLLAADVSVGQCFQLARQITEGYRKGEFDAVKLCYTRFDSMMTQTAVSIEVLPLAMEPTEQQKAEARRSQILYKPSSEEVFSAIIPEYVAGVVYGAVCESVASELAARRTAMDAATKN

SEQ ID NO: 7 - protein, 875346 aa, Faecalibacterium prausnitzii (residues 291,783-583,564 of 875,346)
  misc_feature (47523)..(47526): Xaa can be any naturally occurring amino acid
  misc_feature (112763)..(112766): Xaa can be any naturally occurring amino acid
  misc_feature (321327)..(321380): Xaa can be any naturally occurring amino acid
  misc_feature (424212)..(424215): Xaa can be any naturally occurring amino acid
  misc_feature (432325)..(432328): Xaa can be any naturally occurring amino acid
  misc_feature (457136)..(457139): Xaa can be any naturally occurring amino acid
  misc_feature (514011)..(514014): Xaa can be any naturally occurring amino acid
  misc_feature (657303)..(657328): Xaa can be any naturally occurring amino acid
  misc_feature (717338)..(717341): Xaa can be any naturally occurring amino acid
  misc_feature (731633)..(731636): Xaa can be any naturally occurring amino acid
  misc_feature (736557)..(736560): Xaa can be any naturally occurring amino acid
  misc_feature (751491)..(751494): Xaa can be any naturally occurring amino acid
  misc_feature (752675)..(752733): Xaa can be any naturally occurring amino acid
  misc_feature (783377)..(783382): Xaa can be any naturally occurring amino acid
  misc_feature (831597)..(831600): Xaa can be any naturally occurring amino acid
  misc_feature (833888)..(833891): Xaa can be any naturally occurring amino acid
  misc_feature (874884)..(874961): Xaa can be any naturally occurring amino acid
AGEMIDHLNLYYNRARQAAITQEITEIVAGAENMQLKPEEISKIIRAQIKHYENAIEQSETGTVIMVGDGIARASGLEKCMAGELLQFDNGEYGMAQNLEENTVSIVLLGSDAGIKEGSIVKRTGKVVSVPVGDAMIGRVVNALGQPIDGAGPIETTEYRAIESRAPGIIERQPVKEPLQTGIKAIDSMIPIGRGQRELIIGDRQTGKTTIASDTIINQKGKDVICIYVAIGQKRSTVANLVQSLTEAGAMGYTIVVSATASELSPLQYIAPYSGCAMGEYFMQQGKHVLIIYDDLSKHAVAYRALSLLIRRPPGREAYPGDVFYLHSRLLERAAKLSNELGGGSLTALPIIETQAGDVSAYIPTNVISITDGQIFLETELFHSGVMPAVNPGISVSRVGGNAQIKAMKKVAGTLKLIYSQYRELQSFAQFGSDLDADTKARLAQGERIVEVLKQNRSAPVPVEKQVAILYATIHDYLVNVKVPDVAEYEKSLYEYLDNDAAGAAVMDTIRTTGNLDKDTEEQLKAVLTRYTESFVKAHMTETAKMYGGSLYDLAAEEGLETRILGELDEVQQLLKQNPDYLRLLSTPSIPKKERCGLLDEALRGQVHLYVLNFLKILCEKGTLRELSGCARAYRIRYNQAHGILEATAISAVPLTEQQRAALHAKLESLTGKTIDLKTKVDAKVLGGIRLDIEGTELDGTVQNRLASLRRDIAAVTLMELYQALITLDGWTFLAQICNLMIQLVIFKKFLLKPIKQVIADRKAKADSEIADAQKLRTEAEAMKAEYEQNLQNARTEANQIVATAQKTATARSEEIVGEARAQAAALKQKAEADIAQERKKAVNEVKDEIGGIAMEIASKVVEREISEKDHKDLIDEFIKNVGEASMTDFQYLARGIALAGCGIGAGCALIAGIGPGIGEGNAAAAACEAVGRQPECKSDVTSTLILGVALSETTGIYGFVTGLLLIFLAPGMFMKYLAMELNGAKILYTIHTNIPLLGDFKITQTLVSTWIVMALLSGFAIWLGHDLKLENVSKRQAAAEFIVTRLEQFVHDNMGFHFDQYIPLVGAIFALSIGCNLISVVGLWSPTADLNTEAAWAIVVFVLIMYYKIKTNGILAYLKGLLDPIFIMAPINVLSEISTPVSMAFRHFGNILSGTVISTLLYWALASLSHVIFGWLPGFLSQIQLFQIGIPAFTGLYFDWFGGCIQAFIFCTLTTIFIKRAAGEDMKLQPESKKELLRIACGVSLCTAVMWVVFAALHLVGWVVFDYRVLLGGIIGALVAIGNFAGICFVVQKVIDEPDEKKRKAQLQISYNTRMLLQALWIIIAIAAPCFQAFAGVLPLLFPRVTIYYLQITGKYKPLTPPQEPVDIAVEDDPAPAEASAVQPRDEGGEQEMKGWYKALEDLVWLTQLGLNMLLPLVLCLAGCWWAVEHWGWPEWLFLPAVGLGLAAGAQNFWVFCKERLERSKHEKNHRVGFNSHQMKILYAASEANPFAKSGGLADVAGALPKALVKDGVDARVIMPLYGDLKYRDKLEYVTNYSVPVGWRSQYCGLFKADVDGVTYYFLDNEYYFKRRGLYGFYDDGERFAFFSRAVLETLFYIDFTPDIINCNDWQTALVPVYLNLYYRHLDKFNRIKTVFTIHNIAYQGKYGTDILEDTCGIGHRDQHIVEYDGCANFMKGAFETADKITTVSPTYAQEILDPWFSYGLDALLREKQYKLCGILNGIDMDANDPATDKNIPFNYSIKTFETGKAKCKEALQDRFGLHKDGSPVFGMVSRMVGMKGFDLVQSIADGLVDRGIQLVILGSGESQYENFFSDLCGRHPGRVGTYIGFEPKLSQEIYAGADAFIMPSKSEPCGLAQMVACRYGTPPIVRETGGLRDSIHDSTMGDGNGFTFAGYNAHELYVACCNAQDAYNNKENWKNLVRHCMECDFSWDVSAKSYEGLYNETANLWMLRQNTNALGIIFPNSYDNTVPELVTERAMASIPFAGRYRMVDFVLSSMANCGISNVSIVVRKNYHSLMDHLGTGREWDMARRHGGLNIVPPFAEKGVRIYSGRVEALGSILSFLEHQKEKYVVMSDANIAVNYDFNALLAAHQASGADVTVAYQKTEIPEGRKNDNYTLTIDADGRVTELLFNDYRSGVQNLDLNIYVLERETLIKLVKDATARGLIYFERDILAHNVNILNIHALEYTGYVAHICDMKSYFDENLKLIDDRNLEALFPKGSPIYTKIRDDNPTRYVTGSKVVDSILADGCVIEGTVENCVLFRGVKVKKGAVVKNCVLMQDTVVEPNVELDCVVTDKNVKITAGKKLSGTESFPVYVQKNHTVMAKEIVAMILAGGRGSRLYALTQKTAKPAVSFGGKYRIVDFPLSNCVNSDIDTVGIATQYQPQKLNEYIGNGQPWDLDRLHGGVHTLPPYEQANGTDWYKGTANAIYQNIGFIDSYDPEYVIILSGDQICKQDYADFLRFHKEKGAEFSVAVMEVDWKEASRFGLMVADETDRITEFQEKPPVPKSNLASMGIYIFNWDVLKKYLIEDEADPNSKNDFGMNIIPALLRDGRKMYAYRFAGYWRDVGTIDSLWEANMEVLDPENSGIDIFDKTWKIYSRNPVLPAQKIGERAVVQDSLITEGCKIYGNVKHSVLSAGVVVEEGATVEDAVLMDGVVVKAGAVVKRCILAEDVVVGAGAKVGGEGAIAHVGTGLTIGAGATVKEGAKVFESVKEGVEVCMKPTEEKIQSNTSDLPVYLFKQGNNCEAYRYFGAHLETRVGESGVVFRVWAPHAVAISVVGDFNSWKPGSHPMHKVDGDSVWELFIPGMKEYDVYKYCVTTRAGDLVYKADPYAFHAETRPSNGSKVYDLSGFAWHDATWQAAQKKADVINGPMNIYEMHAGSWKMKEGGKPYNYSELADELIPYIKDMGYTHVELLPVMEYPFDGSWGYQVTGYFAPTSRYGTPKDFMAFVDKMHAAGIGVIMDWVPAHFPKDQFGLYNFDGEACYEDPNPKRGEHKEWGTMVFDFGRNEVQSFLISSALYWLEQYHIDGLRVDAVASMLYLDYNRKQGEWEPNKDGGKENLEAIAFLRKLNNTVLGRHPHKYMIAEESTAWPMVTKPASDGGLGFNFKWNMGWMNDMLSYMKTDPLFRSGNHNKVTFSFFYAFSENFVLPISHDEVVHGKGSLLNKMPGEYDDKFANLRTFFGYMMAHPGKKLLFMGQEFGQFAEWNEAKQLDWMLLDYDKHAELQNYVRTLNAFYKEHPALWQIDYSWEGFQWIVPDDSQQSVIAFLRKDAAGKQILVICNFNPVLREGYTLGAPVSGTYKEILNSDDAAFGGSGTVHNKPVRTHKKPQHGFEQSITVTLPPMSTLYFEVPTKRTRKAAEDSADKPAKKTAKKATVKDADKPVKKTRTTKAKAAETADEKPEKAKKTAAKSKAKPEAAADKPVKKTAAKAKTAAKAKTETEAETKPAKRTRKAKAPKEMTSFARLFVRKTNTINTNFLAFSVCCGHIIQNLQLNIVMLAFCVMVVCLVATLGVTAANLRLTYVTDSNGARQVLLTDADASPAQVMHLSGIRSEEGDEVYYTAFSGNLASLNIERAFSVSITADGQEYPVKLVFGTVADALERAGITLEGDDYTEPALDHVVTAGSKIVVHRVDYAERVETQAIPYDTQYVYTSLYFRNTGRTTTVQHGAAGQQTVTTRDRYVDGELENSTVVDTTTTVEPTDHVIKTYGAGAPVSPLTGADGTTNAPTSYSKVLTGKATGYYSRTGKGSSGLGLGYGTVAVDPDVIPYGTKLYITSTDGKFVYGYAVATDTGIAVQKGQILVDLFYETYAESVINGAIQVNVYVVGMLKIHERIAPRKKEKIRRKPPKNQNIKRNTVKIAQKIMLMCTKNVKFSVLRHFAKRGFGTGNASFSPLPEPGNSPAGFPCKTRDVGQLVLGAAAAAAALFAEKRAGANVKNSMEIEILEQQCGGTEFVPRPHRLHLGAQNAEGVDRLQFILPAAWAGCTLALYLRRSDGVQLAAIPLDADDSVTVDRRLTGSVRGQWMLAAIGSGGYTAYTRPGSYDAYATLPTDGGSEELPPSVYEQFVARVLESAHAAAESARRAENGAADTAMQAALAQKTADKILADRTDAEASAKRAEAAALRAESYAPTGGQVLSVNSKGGAVQLNAQDVGAVPSPAQPLPGEMVRILSVDAATGAVQTDTTPLPDLRPYVRSETVPTAATPGAVRADGQYGVAVRADATLTTVPATAAQLDRMTEAYAPLTPALLPYGVKKALTSAAGAAGWSAQEKAAALLQLGADDRFYSKAEADRKFGMGCTLPPATAAVLGGVKVGRGLTVSADGTLEMTAENLDTVLGFSLAEKLNQLRGVTDMNGKLVYTSDGAAGKSNKTMTVPDEVDYIVVRMAVPLECTTIATTGGVAAAAAADYGCTRIVRGGTAVAIVGGGNTYNLRDGVYCKGEALVKVSFAANGTVNIGVVDVNLASNDNAYPFNVEGYQYVMNEMTIRLDRNGAAAVPGGQLLLGYAGNRGNYRLRIEQRGEWKGLTVCAHWHTPGASAATLVENGILTVPAAVTAVPGAGCLTFEGTDGSRTVTSADVRCKVCANSGTAEGAMPAPATPAWEALVGLLGTGGITAAEKRAVLTVLRTLAAGNDAAMDACDRLATLWGNPQPPKENVFAVLGQAILGKMILGRNKMSYVKQNFVDGQTLTAAQLNHMEAGIANAAGTQGEKGDKGEKGDPGPAGAKGDPGEGFTANAKALLLNLFENAAYKTDTMQPTLNALRAEWGGSAQEVPVQSVSLSAVTMTLNESESKTLTATVLPANATDRAVVWSVLPTGFATVANGVVTGIKAGNCTVTATAGGKSASCAVTVEVVETAQLIYSLPGETVLTQGLDTGLKLLEHASTETPQYTILVDAKAGDDFNANTWPAFLHCLTETGDTGNLPGFNSTSSPLNNKTEFAYYNYGGVTLSDSIEHFKTRTRYAVQIDGRKYRGGSTYCPLTEWKTTNGTIIDVPQTFLIGAAQSVDGSKKQQFWSGTLYQCRVYKGLLSDDKVNDYIEKGWMEVFDINGQIISPLAGKTLYVAGDSIAYGKSSAGGYGKCIADKYGMTLTNEAVDGATLTPNITDKVYGGTRGCISTVVTNSTALAKADYILLEGGVNDAWNNAPVGTLTDGFAAAYDETTMTGALEKMLDDLATNYSDKCVAYVFPHGGMFAGSENWYKTYKPAILVALKKWGVPYVDIAETTPPMGKHGVSELGDKYTSDGTHPNAAGYERFYAEPIAALLKRLMALQAYSLARDGSTALSPHFCVREFRCKDGSDPVFIDTALAELLERIREHFGKPVTITSAYRTPAHNAKAGGAKFSQHLYGRAADIRVQDVSVEDVAAYAESLMPDRGGVGRYPAKAGRATGWVHVDTRADKARWRGMTGIISAIIAGAVTLIGVLIANGKSQAVTDTKLEELTREVREHNNFARRVPILEEQMKVANHRIADLEKERNMNDTHCKISAATLARTAALALALTNQVLSACGKPMLPIESATVEQLVTTGLTVTAALVNWWKNNSFTPEAIKADGYLEQLREKKMKNTNTKTLTRVALLVAIELVMKLVGLGSVPVGPLYMSFLTLPIAVGAITMGPAVGALLGGVFGAVSFYDAITGASAMTGALFQVSPLNTFILCVGMRVLMGLCCGLIFKGLQKLDKSRTWSYILSAMTAPALNTLFFMGYIVLAFYGCDYVQNLVSVKGAANPFMFVVLLVGVQGVAEFLVSGILGGIVARAVAKFLKMKLGILGTGKIVQEFLPWLVEHTPFTVQAVCSTPRSAAKAAELCAQYQIPQHTTNYFELLQWVDAVYIAVPNRQHARYARVALEAGKHVIVEKPMAVTAAETEELAALAQRKRLFLFEAITTQYQPNYAKLRELLPRVGTVRMVQCSFSQYSSRYDAFCAGQTPPVFDPQCAGGALMDLGVYNVSYIVGLFGEPNKAVYAANMERNIDTSGVLMMDYSGFKAVSLAAKDCTAPARCIIQGTKGYILQKSTPNYCGGVTFHPNEGREEHYNLNGDRPRQAAEFEAFYRAMTAGDQELCARMLDTSIAVSRVLTVARRSAGVRFPGDRFMILAIDIGNTTVALGGIRDGRVCFVARMDTVRTRTAAEYRAEMDKIFAHRRHPERPMRFEGAVLTSVVPQITGALAECARHYTGKKPVIVSPDIRTGLTMRVDEPRAVGKDRLVDAAYAAANFPLPVVTVDLGTATTFNVVDKDRVFRGGVICPGLSTGLRALGERCAQLPQVHLGSPKNAIGTNTESCMLSGSVLGTAVLIDGMVQRIEEELGTPATLVVTGGLAKYVTPLCRHPLTYDPELLMKGLALLYRLNAPQEHGRSHGGGKHYGQQGHPRAKHPYPNRRTRREPEALVGMDLNGKCVLLGVSGGIAAYKMANVASALRKLGADVEVIMTKNATQFITPLTFETLTGHKCMVDTFDRDFKFEVTHISLAKKADVILVAPATANVIAKMAHGIADDMLTTVVLAAKCPKLVAPAMNTGMLENPITQDNLATLERYGFTVIPSESGVLACKDVGSGRLPKEEVLLEHILHTIARPKDLAGVRVAVTAGPTQEALDPVRYLTNHSTGKMGYALARAAAMRGAEVTLIHGQTALPPVKFTTDVPVTTARQMYEAVTDRFDTTDVLIMAAAVADYRPATVADDKIKKKEGDLSIPVERTEDILGTIGPRKTHQFLCGFSMETRDLVENSSVKLAKKNLDMVVANNLKVAGAGFGVDTNVVTFITPDGTRELPLMSKADVADAILDEILRRRAKMYTYHKIHKKIMVLSENSALPVYFMLQKLYNKSVSPYLEGIGLRCSRMFMYSDYSQHLLDHVKKIHFIGCGGSGMYPLIQILAAKGYELSGSDVLDGSIIRYEREMGVKVSLGHNADNVVGADMVVYSAAISKDNVELNAAASYGIPTVERSVLLGYVSRLYKQSICVSGTHGKTTTTSMITTALELAGRDPSAVIGGKLPLINGYGKAGKGDDIVIEACEFAETFLKLTPYLSVVLNIDNDHLDYYGSMGELKFAFKRFALMTQFMIFANADDKNTMDVMYTLDRRVRTFAIDNHADYRAININEYKPGFFEFDLKEWNTTDTTRIRLSVPGRHNIYNALAMCAVCRFVGLSAEQCAEAALNFKGAGRRFEVYGECNGALVIDDYAHHPTELRATLNTAKEMGYKRLIAVHQPFTYSRTKMLFNDFVDVLKIPDITVLTPIMGSREPNDPTITSAMLAAQIPGSVLVNSLQEAADWVKQNAQPGDLVITLGCGDIYKASKMMVEKDQMTWPFENDTSAITKKLAQRSFKANKLRNIVAVIAIVLTSMLFTSVTTLCVGAIQSIQTTILQIRGTSPSTGTSVNWIAIIAALFFIMIFVITGYLLIRNIFEISVVQEIKKYGLLRTIGTTEKQIKRIVYKQAFWLSIIAISIGLILGYIVGILMLPWILNFMKGEYHNLSVNLSFNPIIFVVAGIFSAITVWVSIKKPFKIAATISPIEATRYYEKDNYHSANKNRLSFKNRITEMAWRNLRRNSKRTIFIVLSMILCIILLNSAIAIGNSVDVKKYVSSVTSFDFVVASPNTFSNVQGFRFKDDSVSNEIISDIENNIPVLNGSRIYKNTLDDVSVTYDYGSLVTEVLDEYTEDNHLIRSGMVDGRTYPVKLGVDYRPLCNIYGVEKSILPKLNFIEGETDIQQLTSYLESGNYVIEISAINPNESPEFLCPLNQEVTIYKDGLPYKTVSVIARAVVDFSLVESPGKNVGYTDVGGDCPIFYMSNEMFVELYNNPAIMSYVFDVEKEHFLPATEYINSLPTVEYASSETLAQTMNGLKQTIFIIGGLIGFLLGSIGLVNFSNIIITGIINRQREFATLESIGMTKKQINKLTVLEGLFYAFLICVMGLPLSLIVANTILPTFFNQPDLWLFTIQPTIFPLILEGIVICVVAIIVPHVSFRYFRKTSIVARLRVVEFQNLSVKRLFGRVAMELVLSMSGITIALFLVTKQIAVLLTGGALLLCAIVGIFVLTQAFGKRLSQFTTDLCQTLDHMIAGNEAPQRPEDSETQLARIGHRLARLYQIMQENRRRVDEERQELQTLVSDISHQVKTPVSNLKMATDILLEKPMTEAERTDFIRGIRTQTDKLDFLFQALVKTSRLETGVIQLNKKPVCLFDTVAQAMSGIVYAAEKKKIAVSVDCPENLTFSHDSKWTSEALFNLLDNAVKYTPAGGKITVSVIPWEMYVEIKVADTGKGISESNQAAIFRRFYREEEVHEQQGVGIGLYLAREIVTRQGGYIKVVSEPGKGSEFSIMLPTKMSCVNIRGCRIGEGRPKVILPIVERTEAAILEKAAQFSTLLADCVEWRADWFEGFQSPAAIARCVQKLRVALRDKLLLVTFRTKAEGGEQALSHKEYLAFLHLILDTDCADLLDIEFFTAGADLPKLVEQAHSAGVAVVCSSHDFTKTPPRAELVSRMVQMQQAGADLPKLAVMPRCRSDVLELLAATAEMADHHPETPVITMSMGALGAVSRLAGETFGSAMTFANPGQASAPGQVSLDIVNEVLDALHLMKTVVLYNIISFIIIVALIFVLRIVSKSNLRQNQQLVIKVIAIILIVCVIAFVLFIDAIAFGIIGPVPNMEKIKMTTPLVEMDGDEMTRILWKMIKDELILPFVDLKTEYYDLGLPNRDATADQVTMDAALANKKYGVSVKCATITPNAQRVEEYKLHEMWKSPNGTIRAVLDGTVFRAPIMIDSIQPVVKNWKKPITIARHAYGDVYKCTEFRIPGAGKAELVFTGADGSQQRATVFDFEGAGVLQGQYNKDDSIRSFARSCFNYALDVKQDLWFGAKDTISKKYDHTFKDIFQETYDAEYKEKFEAAGITYFYSLIDDIVARVIRSEGGFVWACKNYDGDVMSDMVSTAFGSLAMMTSVLVSPDGKYEYEAAHGTVTRHYYKYLKGEKTSTNPMATIFAWSGAFKKRGELDNLPELVHFGEALEAASLQTLNEGIMTKDLCGLAEGITPTAVDSEGFIKAIRERLEAKLAMLNETYRAMLNNKSVIRETFMYGRQRAAQIGSENVFDYSLGNPSVPCPPEFTEAMQTLLAQEEPVSLHGYCPSQGDPGFRTAVAAHLTETFGLPYAQKHIFPTTGAAGAIAHAIRAVTQPGDEVLTFAPYFPEYGPYVAGTGAVLRVVPPQAPTFQPNLDAFAQMLTEKVTCVLINTPNNPTGVVYSADTLTRMAAILTEKSAQYGHNIFLVSDEPYRDIVFDGKTVPYPAAFYPHTLTCFSYSKSLSLPGERLGYVAVRPGCEGEDILVDMMSQISRFTGHNCPPSIIQRAVSRCQKVTSDLSVYQTNMELLYQKLTALGFEVERPGGTFYIFPKALEEDANAFCQKAREFDLLLVPSDSFGVKGYVRLAYCIDTEKVKRSLPAFEKLADAYRKMTQLLIRLFIRRPNSPQDPRVRAAYGNLASVVGMVCNILLCLGKFVVGTLFGSIAITADALNNLSDASSNIVSLVGFKLAAKAPDAEHPYGHARFEYLAGLVVSVTILGIGFSLLKESVTKVLHPTPVQFGWLTVAVLVVSILVKLWMSGFNRAIGRIISSETLIATAADSRNDVLSTAAVLVAAILCRVTGWDVLDGLMGVGVAVFILISGWGLVMDTLSPLLGESPSEDLVEHIEQTVMGYPGVLGVHDLMVHDYGPGHQFASIHVELPAEQDPLEAHDLIDNIERDFMKHDHLMVTIHYDPIVTSDAAVGVLRSRLTEKLRQLDPALSLHDLRIVPGKTHTNVLFDLVLPAGYAGDKVELLTQMEQFIKEQDPTYNCIIKLEQSYTAAAHKMVLKAFQKFHPITPDIKPGCSTKSLGDRMAAGAFRRFRDCLFTVSCNMKKLFNSLPFRLLLGIFVGIILGQLFNESTMGVVVTLQYIMGQLITFCVPLIIIGFIAPSITKLGKNASRLLAVAIIIAYVSSVCAAFMSMGAGYGLIPHLSIDNNVAGLRELPGVVFELNIPQIMSVMSALVLSVLVGLAATWTNSKLTCDFLAEFQNIVLDIVSKVIIPVLPFYIAATFCGLSYEGTITHQLPAFLQIIVIVMVGHYIWLAVLYLLAGAYSGKNPWEVLRHYGPAYLTAVGTMSSAATLGVALECARKSKVLRKDMVSFGIPLFANIHLCGSVLTEVFFCMTVSKILYGKLPSVGTMILFCLLLGIFAIGAPGVPGGTVMASLGLITGVLMFDNAGTALMLAIFALQDSFGTACNVTGDGALTLMLTGYAEKHGIADTGDLESPILMFVRILNSEMELATGCTEPGAVALTAAEAGVALRKAGGTRVEAVTVRASINIIKNAMSAGIPGTSYQGMDYAAAIGAVGGDPVHLLEVMNYVPREQMEEAAALVKAGKVKVEVAQVPQKLYVEVLVTSDGHTGRAVVRDLHTNVVLVEQDGVATLDKQHTDPAAAGDSDVVTPEQIAEFLTVRSIWDYCTEELDPLHDPIDIIRSAVQVNTTISNEGLSKEYGLAIGRNLELNCRKGLMTRDLTTNAMVIASAGADARMAGAPVSVVANSGSGNQGITATMPVVATARWLDIDEEKMLRAVTLSNLIAIRIKAKFGRLSNLCGATVAATGAACGIAYLLGGGYHEVCCTIQNMVGNVTGMVCDGAKADCALKISTCVNAACQAAAMGVRGVRVQSTDGIVEHNVEYTLDNFATLSTHGTSDSVILDLMLNKHLPETEMKQVIITPNAPAAIGPYSQGIAAGQTVYVSGQLPIDPATGLIPEGIAAQTAQSLKNIQAILAQQEMTLANVVKTTVFLADINDFAEMNKVYGEYFAQPYPARSAVQVGKLPKDAPLEIECIAVKMDARLEPYRVVVSFLGEALGPDYEVVLHDLTSEDGTIVAIVNNHISGRTEGAPLSNMALRFIQERMYEKQDYLAGYQGASQAKGRLRSSTMFIKDNGQLIGMLCINFDAGKYSRIAQELLALCGAHTEPSSTGIGVENFVSSLPDAVQNAIAEVTGSAGLPSDRLTMEEKIRIVESLHHAGIFYMKGAVSEVAAQLGSSEATIYRYLSKLKMTAQTMQIGNKPCRIYGEPHAEYLLLQMTGEHELQSMDSEVAAIAQSAHHFLFAAIPVESWNDALSPWKSPAVWGKQGFGGNAAETLCFLTEQVVPTLKQQFPLPENVKIILGGYSLAGLFALWASTQTDLFYGIAAASPSVWFPDWMEFEQQHPIQAQRVYLSLGDKEEHTKNTVMAAVGDNIRALHSRLAECGADCTLEWNSGGHFKDADLRTAKAFRWVMEESRMNILIDADGCPVVNLTLQIAKRFGVPVIILCDTAHQIEREGAQTLVFDKGADSVDFALVNRVKPGDAVVTQDYGLASMCLAKCARVLNQNGLEYTADNMDALMLRRYENKKLLRAGKHPKGSPKRTKEQDVRFADTLEKILSINYMRTLLECYKILEEYPNGMTKDQFYRVARINKQHAKYLLDSGLVPCINTGKKTRKYHIATHDVIAYLCDREDHPEKYKVPTGFYIGKNGCSKRHPDKPAAEIIRFHFTEPEKTGLYTLWKKFTVGYDDLLTTPEVSELTGYSAQSIQRWCNQKILVGFKIRGTLTIPRLAVVEFMSGDRATGIVRKSSKHLDLLRTYAQDCHEGAMTITYMTLDYFYGQSGELFSYFRIPKALFHDCRFRQLSTDARTLYGILLDRMSLSVKNGWLDEQGRVYIIYTVREVQESLCCAEHKAVKLFRELEQLNLIERKRRGLGRPSLIYVKDFSSGLPKAQVQNCPNSNSGAAKSAILEQPKPQANKTDKNKTEWNDPDPIYSGGIREQLEDYFYQALEVDLLLRLCPDEEDTIYQIVDLLVDTCATNRKMLRIAGDDKPIEVVRSRLKKLNADHIKFVLDSLAENTAPVRNMKQYLLAMLYNAPTTMQLSYQNQTNHDLANRRMKISKKATTIVIVNQKGGTGKTTTCENLGIGLAMEGKKVLLVDADPQGSLTISMGWQQPDELPTTLSTLMAKTMNDQPIQPGEGVLHHAEGVDLIPANIELAGLEVALVNCMNREKMLKQVLEGAKYDYDFILLDCTPSLGMLTVNALAAADAALIPVQAQYLSAKGLEQLLQTVQKVRRQINPKLKIEGILLTMTDSRTNYGQQIDNLIRGAYGSKIKVFDQTIPRSVRAAEISAVGKSIFQHDPKGKVAEAYKSLTEEVMANAERQLKRVAERGRMPKGSLNVSLKGADDIFSTEESRQEQQREQVQQIPIGELHPFTNHPFKVLDDEAMTRTVESIAQYGVLAPLIARPRPEGGYEIISGHRRQYAAKLAGLDTLPVIVRNMDDDAAVLLMVDSNLQRENILPSERAFAYKMKLEALKNQGARSDLTSVQVAPKLSTEKIGEEVGMSKDNVKRYIRLTNLVPELLDMVDEKKIAFNPAVELSYLDEAQQRDFLEAMNDTQNAPSLSQAHRLKKLAQEGHFSYDVAFAVMGEEKKDELDKVVIKNDTLRKYFPRSYTPKQMEDTIIKLLEQWQRKQQRQNERMKNNATRTIRSEEITIDVRICAALAANRSGEVYLAAIAPDMELTVITLDEAPGILPCFEEDDACLNLSNTSLLLCYNPAQVLKMGGKHYLTGPVILAHTNMDGEVISLTIDEVYLFQKYLESHSITLMADDQKLPCICIDMLNFFIGFAFFEAGAIFGFFVAALLNAAHAGQEETHEEIMKKFDVEITETLQRTVTVEAASQEEAERMVDRGWRDGDYVLTDEDYVGVDFKTTGEHELSEKKMLDVLLVKPNEHPQNVSIGAELKDLQEAVGGSIDAVYPFADPVAIICHDEGKLMGLPLNRALRDEDGQMYDAVAGTFLVVGLGEEDFASLTPELAQKYEQFFHQPEAFLKLGNRLLVLPVPDEPPGEKPRTKPPAEHDRMTWPFENDTSDIEKKLAKKSLQSEKRRNLMVVIAVALAAFLICFTGIVSTSLTQMQRNQVVDTYEAVWLGVEENDIETLKGLPEFERVGGYYMLGEELSEQGYHASYVYCDAQMMEIAKAQMELLEGRVPEKANEVVVSEYFLSTYGNNAKIGDTVTLDTESFHGDYVVTGITDSVNEKEANTCAIILSNAALTEWNGFDPAGYRAYVHFKNSDQLGEELMTSYCREIAEEYQLPMPKMNSKYFAYASKSFDFALMAGVIALVLIGGYIVIQSIFRISINDKIQSYGQLRTIGATPKQIKRIVKNEGRKLGSIGILIGTVLGVCGGFLLFSKGFNAVSYVATVILTLISSWIMISVSIRKPVKIAAGISPIEAVRFTPAQKDIRSRKKNIKLNPVSMGIANFRRDRKKTVAIVASLSLGGIILLVVSSIVLLRSPEALARQFFPDGDYKIYLDSEMTEEKVMAAGNPLNEELKQKILSIDGVTDIIPSRQSLHATYKTEIHQAGGMCDMLTDQNYAAVEAALTEGTMPTDSRSIVIDYNVLKQNEDMGVGSTVEISLGEEQPSVSVTISGLYAPAKVYSGHGRMHLDGATLFAPEALFHELHPEITSFDYSWSIVNDAKKTDYVGAELKNIVASHSNIALDEINTVIEYEEMTNSFAFGSMEILSWLVFLFGVINLINTTLSNQIARKQENSILRSIGLTQKQLCKMNICEGLCYALFATLATLIVGLPASIFACRKMSIGAFAGNVVPYKFPVLEMGLFILVLFGMELILSVWTIRRQKKQSLIEQMRAMEMCCPAFFAISQKIFEMSELCNNSACFSVEIKGTSDICVTFGFYNNPHKEKMKISKNIFETGSFSGGNRKAQQTENGQPGIMKARNAQMEAIPRNDGEQYRFDAFCKAVLRNEARNYHRNKKRLLDREKSFSVLSLEELGQLTSVDHYPSEEFIFSSYGCDLHLDNELVANAFAALPKQEQSILILFCVLELGDGEIGDLMEMSRSAVQRHRTKTLNELRKKLKAHLPEGGMNSYEHTSRDFLPLSVIRSACAGDTDAVEQVLQHYRGYINKLCTGILYDKHGQPHVCIDEYMKRHLEIKLISSIVTKAETVMKEQNLIRYSIQLAFLKQLLDRKLITDREYSLIKQRLMKDYRVVSELSSMKDVEVIKARNTLSPRVRTNFEKRLRVAAYCRVSTDTEDQLNSYKSQVEYYTELIKSKPEWSLAGIYADEAITGTQVKKREDFQRLINDCMNGDVDMVITKSISRFARNTLDTLKYVRMLKDKGVAVFFEEENINTLTMDGELLLVILSSVAQQEVENISANVKKGLKMKMQRGELVGFQGCLGYDYNPEDKTLTVNEEEAAVVRYIFQRYTEGAGGSVIAKELENLGYKTKRGSPKWADSTVIGIIKNEKYKGDILLGKTFTVDPISKRRLYNFGEEDQFYIREHHEPIISEEVFEAAQEILRRRAKPRSLNVDGKREKFSRKYAFSCMIECGFCGGTLTRRSWHSSSQYNKAIWQCVVSTKKGKKFCPESKGVDERTIERAFVESYRLLCQNNKDVLDEFMKRTEEALSESNAGKRLAKAEKDIHALEVKKNKLVDMRLEDTIDKETYDRKYLDLSSQIEQLQKECESLQDAAETESTMRKRVATFRQTLEQNEVLDTFDRHIFESIVEKVIVGGYDSNGNKDPYMIVFVYKTGFKNSVDGKNFKPLRKNSKENHSPAVLCSHASNEAESMCSDSSDDTYRDGMCIVQTGCPPQKAIWEALKHFMDRYFFILTTIDLFVLGFMCLLTRLSESLNKKQKRGFLLAFALIACISVLEVITIVVDGAPPGYRWLNILSNYLGFGLTPAVPLCLVYVLDKKSIIRRVFKAAVCCEGAYLLFLAATLPYGLVFSVSRENLYARGAYFYIYVAMYYAAMLYLMVATVRTAAAFQNRSRMLIYPLTLFLGAETVIQLALPELHVTWLCVTLLSVLYYIYCSEMWNQLDALTGLLNQNSYLNRTAEMRRSGGVLVVFDVDDFKQINDRYGHLQGDVCLAEIADCIKKAYARCGYCYRIGGDEFCVLLKDEESEARCAKTLQALLAERRKVFAILPTVSLGSAAFSGEDVVAVKARADRALYCAKKEQKARAAAEKPADGIEEKDMNTDWNSPQGDFDTAEKQGELLMLLSRQQVTVHTWDDPDFDYMEEQDLALVVQSPSGTEDLLIELCGEFSVFFEKWHGEYVATAEGYAQLQQDITAILDGKAGALSLYTENGWQGTVLCTELPGAEDAGAAAALKRCWQAAKPDAALPAGSRLELVCWDPAQNRKVQLPSEMPFEFAFLDWLYQFRNPVMNTISIFFDYAGAHGEIWIAFTLLLLLFRRTRKAGFAMAVALVLYMAAGHFFLKPLFARPRPCDLNTSITMLVARPHGHSFPSGHTASGVAAAYALWLQNRKLGAPALVLAAFIAFTRLYLYVHFPTDVLGGAVLGIALGAAASAFANYMANRKKKQQIVMSDRILFSIGEALIDMIPSRVGCSFDEVPAFSPRVGGAPANVCAAVARLGGRSALLSQLGDDPFGHKIARALAGCGVDLSHLEFTGKASTALAFVSLAENGERTFSFCRKPSADLLYAPEQIDPGWFSQAFALHFCSVSLVDSPMRYAHLAAITAAREAGAILSFDPNLRFPLWPDREQLRQTVWQFLPLTHILKLSDEELPFLTGTEDIEAALPTLFTGDVQLVLYTCGSKGARAYTRTASAHARSPKVTAVDTTGAGDGFIGSFLWQLQRDGVTTAELPKLSRKRLTEYLTFSNRFCAFSVQHHGALDSYPTLAQMEQPETDFPLPMDLTKQFFKYVSQNIFGLLGTSCYILADTYFIAQAAGTDGVTLLNLCLPIYNFIFAIGSMIALGSATRYAIAKAQNDARGQRYFSNAILCAVLASIPWMLAGAFVPGALLRLMGGDAGIVTLGIPYARIFLLFAPFFMCNYIVSAFVRNDGDPSLAMVATLSGSLFNVVFDYIFMFPLGLGLAGAALATAVSPIISIAICSRHFLKKENTLQFVRQMPSARLLAQSCQLGISGFVGELSSGVTTTVFNFLLLGLAGNVGVAAYGVVANFALVATAIFNGVAQGAQPLVSRCYGQNDHAGARKLLLLGSGTVLVLAAVLYAAVFGLTDTLVSWFNSENSVQMAQYAHTGMRMYFVGYFFAGFNIMAAGYLSAVNRPVEASVTSICRGMVAIVACSLVLSAVFGMPGVWAAFPASELLTALLTLFLLRRKKAETAMLFDWNTIAAPAALLDVQLSAPRTLTGEGLWVCLVSSGRCTASLPGASAAPAGSVLVLPPQSAAAGHLILSRAPLTLTPEDSCHLLCVQLTGQASTQFLNGLRELPYLAKGETCPAAAELMGRLAEEKPTHSRARSQLVFALLCELADADSAAPALPPLVQAAIEDIRANYAGLYGVEELSERLGVSKSHLVRTFTASVGVPPGKYLTTVRIEAAQRLLLHREYTLDVVASLCGFSGANYLCRVFKKETGQSPAQWRALTGRAAQAGLTPEETMREQEMYIMLFYITKLSAIIVPTKQHAVKGVKHQIFTEDNDYGFHMASISCQHIYKIYPGATAPSVTDFNLEIQDKEFIIFVGPSGCGKSTTLRMIAGLEEISKGEMYIGGRLINDVPPKDRDIAMVFQSYALYPHMTVYKNIAFGLELRKTPKDEIDKRVHEAAKILEIEHLLDRKPKALSGGQRQRVALGRAMVRNPAVFLLDEPLSNLDAKLRTSMRTEIIKLHKKLATTFIYVTHDQTEAMTMGDRIVVMKDGIIQQVDTPQNLYDMPCNMFVAGFIGSPQMNFLDGTLIKKGDLYGIDLGGDVIPLPKEKTADGKLDSYVGKKIKMGIRPEDIDDEPEFMAKHTDCQLDAKVDVSEMMGAEIYLYLEYKGNKMTARVAPTSKARNGDTVRVAFDPHKVHLFDIETEQTILNMELRTVNTFLHIAELHSFSRTARQLGYSQSAVSSQIAQLEAELGTPLFDRVGKTVRLTDAGQTFLGYARTLLETAQQAQAALQPAQQVRGSLRIALADSVCSTFLPGLLQRYHARCPQVELVLHTASTDEMLQLLSTNQVDLVYTLDQPLLQPALVLAADVPEPVCFIAPLQHPLAQESVLPLDILPRQEFLLTERGMSYRDALDQCMAAHGLAIHPYLELGSAALLCQMVEQGMGLSFLPEYIVRSALAEGRLARLNVPDCTVMMHRQLFYHRDKWVTPQMNVFIELVRQGAQTKMQQAPEAMTLKVIAHIHTAFPTKFGIPRQSGLVEELRGEIVFTPEYRNPDALRGLEDFSHIWLVWQFSGAVRENWSPTVRPPRLGGNTRVGVFATRSPFRPNPLGLSSVKLEAIEQRPDVGPVLIVRGADLMDGTPIYDIKPYIPYADCHPDAAEGFTGQTRTHHLEVSCLETLWQTVPEADRAALQGVLASDPRPSYQHDPQRVYGMEFAGLEVHFTVDGAQLTVQDITLLMFGKKKMSPSYDPAAQKPILRCSICTGEQVAGFQDLHTGHFTEVQLIRSPQELQAFRSRYGIPADCPIEKIYMSDLSTRVRLRREQLGLSQEELARRMGYRSRSSITKLEKGINDLPQSKVEELAQALETTPAALLGLDAPCACPPGFEPLPTMVQVPLIGSIACGTPITAEQNIECYIGVPAAWHADFALTCHGDSMSPTICNGDIVCIRCQPEVEQGEIAAVRVGEEATLKHFHRQGDAVMLLADNAAVCPPMFYAGEQLSELHIEGKAVGLCRGLMANTNLIYTYIQDSGYKLQYVASVLHISSNTLRHKLLGETQFKLDEAERLSTMLGLTMAERDACFFDAENRFSRSATLELPKRGKRQMTPEQRDVTRNALRKYGERHWARTPENRRWQSAIDEGLDYYQAHDPMRADLLRMRFFEQRPEDEILEQLHIGRTTYQKALQDLLSTIAVYAAQRGAFMTLRGIITLVILAVLFALAVVWISRQGGWKGEGCNGNCASCHSHCEDPNTKKKMRRIQTGVIAVCLAAALLSGCAGSSAQSTASSTAASSAAASSVSTTAVSANYDGGSGTQEDPYQINSVDSLLTFASNVNDGSQGGYAGVSFKLTSDLDLSGVEWAPIGNMNDMETHSTLFLGSFDGDGHTISNLNYTSDVYNCGAGLFGVSCGEVKNLTLENATVAVTEGTSMAIGGVVGYNMGSVYNVTLKGDSTITGNNCVGGIVGGNNNSITNCTVKGATVVVIGDNHFTDQIIQADVAECGGLVVGGSFGGSIDSCTASGTVKATGNEPVGLGGIGGCLEMMDTITNCTADVTIESENGGHAIGGLCGYAGTHSNPDICLETEGFSTKNYPSVIDNCNVTVNIKANGATHVGGLVGTGLYYYGEETVFKITNCSVKGSIDGAVTPGTVAGRAEGSTIESCTADVTIDENAGTEQVGTTTQMYESADQMKQCPIDFFDPEVQHLAASAGCRLYRMQNDTGEGLISEYPILSGIDLFYNDFHMKDGQNQNKRPMPDTIEINHCREGRFECEFQNGDYQYIGAGDLSIHRLSHTTRQTRFPLAHYHGISITIDLPRAQQTLSSLEAIMGDLDIHLEAIAERFCREESCYVLRSNREVAHIFSELYAAPPERMAHYLKAKVLELLMLLNDLPQESFSEKRRFFSRSQVTAVRAIHDAMIQDLSHHYTLAELSRQFGIAQTSMKLCFKAVYGSSIYQYMKTYRMQTARVLLQDTSRSVTEIAATLGYDNPSKFSEAFKKEYGISPTLFRNSPSELDVSMTWPFENDTSDIEKKLAKRSLHRERQRNLFAIIALVLTAFMITATFSIGFSYFETYQMQQIRLMGTTADVGITNVTENQLVEISKSNLVLDVGIQQRLGSVDTEQLQNARLGIVWIDDTEWGTHRLPTISSVVGNYPSSKNEIMLPTWVLEQMGISDPQIGMEIVLSYQIGDSYNYVSDTFLLSGYYTDYIPMRTNNRGYVYVSSAFKDSLNVSLDNSVTAMIRFQGNDNADKNCERLRREIDFTEGQTFEIVPLEQANGGTIILAVIILAVFISFSGYLLIYNILYVSVVKDVQFYGRLKTIGMTQRQIKRIIYKQAIRISCIGIPIGLLLGAVVSFGIVPYFLNMMYSTNSDVGTKVSFSPFIFIGAAIFTFITVMIASMKPAKIAGNVSPIAALQYTAASTKSSARNCSKMKLSRMAWNNVFRNAKSTTLVFASLFFGLSLFLVVTGLLHGLSPENYVSQWGVSDFALTYSIHEREDLISSEMVSEIGQLDGIENLRLTYAPYPQVAADVVYDDAVFHEFLASLDGVNGIDFSDPAKLENYQQNFFSGVFGIDSAYLEEINKTLNLPIDTSAFEQGKVVLLSKTVEGLIQPGQEITIQTQNGQHSFIVANGYLNEGFRAGGGNERGTAPDLYISQTALKELFPQYRVFRVAFDTDGQHDESILQELKQITASQANIDIISRYERREEMQEYLITAKVLGTGLSVILLLVGVMNFVNTMVVNVNTRRYELAVLESIGMTKRQIKRMLFMEGFYYWGVSLSLAVTIGTAIFILLYMIFSKVAYYAVFSYPFIPLVLVSGLVLLICLIVPIWVYKTDVNLPVVERLRLTEMKRNQNSDHNPPQKVLSCRYNMDTNRLEAQFNDGTIVNFALLMKYLVIAEKPSVSKSIAKVIGAYRQEDGYLEGGDCVVSWCLGHLAEYAAPEHYDERYENWRFEDLPILPVEWKLLVHNTKKPQFNVLRKLLRSKKFDYVVNACDAGMLKRLGVVIPSTILTLLMAVSFSTPAFAFVDTTEVTEEPVQVIEEAEPTEEEKIPFTIAGNGEVEDNIVDDPSKEFFTVKTKGGNTFFLVIDRARNSENVYMLSMIDEYDLQEFLDDEERNGKQEEETPAVVLPETKPEPTPDVEIEEPKEESSGGMNKILLLVFVAALGGAGAFFYFYIYKPKPKEETPQSENLETDQSLATVNEDNQSDNENGTMGKKLQKYLDEAEKTEQQIAELEERLRTIRAAQKKEEDSEIIRAIRSTKMGGRELLALLDNIQAGNVTFLTAVNNASEEAETEEAIEEDAMADKKFRGRDKIVQKMTKDGLVDENLRTGEQKSATTEEKPEQEDSSKETAEKETDEELCMDAEDGEDAPRHHSTAKQSADYYKAHQEEGKPKDAPAGSDAEPQPTKKGRLSFEDEKGGIVCGVGMGVKKVAKKGVDAATGFAHQKVHQVEKDNSGVEAAHKSEEAAERLHHFVKGRKKPKDKSARAEKRGGEDQKSSRLKFSESEGGTAENAAEPPLKKKQPQPPPTAAGGEAKTVGAKFYQKKQYKDAYAAAKRGQKAGTAASKQAAAATNTITEKAKAAVQEIVVQHKTLWVSIGVGILLVMVMLGAFSSCGAAIQGTGSTFVGTTYPSKDADMKGAEEDYLELEKELDKQIRQMESTHPGYDEYRYQLDEIGHDPYQLISHLTAVYEQFTRGQVKPVIKELFKQQYLLKVWETIEIRTRMETRVGVRPTIDAFGNVSMETYTYQEEVEYEYKILNVLLKNKGFDTIARKNMNRKQTGRYDAYNLTYGNRPELFGAGSPTYSGGTTGSIGTGGGTGGSGGGFKYDIPSEALSDEKFARMIKEAEKYLGMPYVWGGSSPSTSFDCSGFVCWVINNSGNGWSVGRTTANGLRGKCSYVSPADAQPGDLIFFEKTYNTVGASHVGIYVGNGMMIHCGDPISYTSINSNYWKRHFLGFGRINMNTPNIFDRLSRKIHHHSDMEPHESDSGPPFGEVEPLNFHDEESVVHTVLEDFYAVGTLADELTDGFHMEAHGYLDREEVNARLIAFARKLEQVLDKWETHAALIAMVKSEPKKKPHFGGFFQKFFRKPERNEKEQRLTVQRSIPYLEMGRDGICRVEEHLYSKTVRFYDINYQLAQNEDKNTIFESWCDFLNYFDASIRFQLSFINHKSDMSEYNKVIQIEPQHDAFDDVRMEYAQMLKQQLAKGNNGLVRTKYITFSIEAKSVREAKPRLERIETDILNNFKVLGVKAYPLNGVERLQIMYETFHQEEQQRFDFSYDRILQSGMTTKDFIAPTSFLFKSGKDFMMGDTYGAASYLNILAPELTDKVLAEFLDMDKNLVVSIHVQSVDQLKAIKLIKGKITDLDRMKIEEQKKAVRSGYDMEIIPSDLATYGGEAKKILDDLQSRNERMFLVTVLFLNTAKTKQELDSAVFQTAGIAQKFNCTLNRLDYLQEQGLMSSLPLANNLVPIKRALTTTSTAIFVPFTTQELFMEGDSLYYGLNAVSNNMIMADRKQLKNPNGLILGTPGSGKSFSAKREITNVFFTTTDDIIVADPEGEYYPLVEALGGQVIHISSTSKDYINPMDINLNYADDDNPLGMKSDFILSLCELIMGARDGMEPEEKSVIDRCLPLVYQKYLNDPKPENMPTLGDLYDCLREQKERQAQRIATALEIYVNGSLRVFNHQTNVELDNRIICFDIKELGKQLKKLGMLIVQDQVWNRVTINRNSKKNTRYYIDEFHLLLKEEQTAAYSVEIWKRFRKWGGVPTGITQNIKDLLASREIENIFENSDFIYMLNQASGDRQILAKQLNISPFQLSYVTNSNEGEGLLFYGNTIIPFKDKFDTSLKLYSLMTTKPNEMGKYKEKKEAMAYVTIPKDLSKVKNKVFLNLTKRQLVCMGFAAGIGVPFYFLMRDTLGTSNAAAGMVLLMLPEFFFALYEKNGMHLETILTNFISVRFKRPAVRRYEVENLYERELETAAPIQKKGGILGKKMFDNIFAAIEKWMRELLSGMVESNLSTMFTAVNQQTSEIAAQVGQTPQGWNSSIFSMIRNISDSVVIPIAGIIITLILCYELISMLTERNNLHDVDTWMFFKYFVKMWIAVYLVSHTFDIAMAVFDIGQSVVNSSSGIIRGNTAIDISSLSMQMQAAMATMAIGELVTLALETLVVSWCLKILSVVITVIMYGRMIEIYLYTSLAPIPFATMSNREWGHVGTNYFRGLFALAFQAFLMMVCVAIYAALIGSIRVSSDIHSALFGTMAYTVILCFSLLKTGSLSKQIFGSHMQEAGSTEDVPACFSFGIVFFINTAIWRKTTMEFFNQAITVLQTLVVAIGAGLGVWGVVNLMEGYGNDNPGAKSQGMKQLMSGGGVILIGTQLIPLLSGLFGMAYDEMELDLLGDRRTALFVIISDTDDTFNFVVSIMYTQLFNLLCDRADDQCGGQLKYHVRLLLDEFANIGLIPKFDKLIATIRSREISASIILQSQSQLKTIYKDAAETIIGNCDTMLFLGGKESSTLKEISETLGKETIDLYNTSDTRGQSPSFGTTYQKTGKELMSRDELSVMDGSKCILQLRGVRPFLSDKFDITKHKRYKELSDFDKKNAFDVERYLKHELRLRMDEEFDCYEVDVSEESTAMTENRNTAAQTTTQHTAPTVRKQINGTTYIVRVHFNENARETMEDKIKRLLRNEIQQNVTCLMNYKTVFQNDPLLKGAIRKNLLTERTDIVKPLGWYRESSTLTDVDIKYLLLYFEEHYGLTVEKKIEDAALVIANENRYHPVCDFLNGLEWDGQERIRFCLHRFLGSDADDYTYEALKLFLLGAISRAFKPGCKFEVMLCLVGGQGAGKSSFFRLLAVKDDWFTDDLKKLDDENVYRKMQGHWIIEMSEMIATANAKSIEEIKSFLSRQKETYKVPYETHPADRKRQCVFGGSSNTLDFLPLDRTGNRRFVPVMVYPERAEVHILDNEEESRAYIHQMWAEAMAIYRSRDFKLRFSPTMNEYLKAHQREFMPEDTKAGQILDYLDSYTGNAVCSKQLYREALGHEYDEPKQWELREINDIMNNVVKGWKSFSNPRHFPKPYLRQKGWERELPDNGEADNGDGRFIPLSDAELEQMELPEGWRMNVFEAVKQSVTTRQAAEFYGFRVNRAGMIACPFHNDRTPSMKVDKRFHCFGCGADGDAVDFVSRLFELPSKEAAMKLADDFGIAYDRNGKPSIVAKIREPTAKQKFEAEEKRCFRVLSDYFHKLRAWEKDYAPKQPEDEWHPLFTEALNKRDYIEYLLDILIDGTLEDRKALVAEQRNEVMKLERRFADSRQRGNSRPIRTDTARMKLTRHNGRSGKHGTYNPKHNDRTFDVSNSEHIDEERAKHNVYWDCFNGYRTFAEKQVQSELADTFEEVEELFYSAKYGAYVEAQNARNDKNRHSERNRTTTDLLKDKRTCPEETIYQIGKMGDHVSPDVLLKVVTDFFVEMERRFGSHVHILDWALHLDEATPHIQERHVFDCENRYGEICPQQEKALEALGFELPDPTKKQGRHNNRKMTFDSACRAMLFDIAKRHGLHLEQEPEYGGRAYLEKQDFILAKQKEQLEVQEQRLEELTLKIEDVETLIDDVADIAYDKAVEVVTDTVRVETHKEDIRLIEETKTWLQSPERKAPKKERDYAISRLDGVIGKIKNAMQSALQKIQSRLLSPEVKKTSKEQIKEKVKPSILARLERNKELAKQENEARRSEHRPHKKQNMELMRKKKLVKRVAGIALTVGVVILAIVCVGKVNRIQNEKDIIGTWKDTNAEEVFTFQENGELAVSKDMPDSGLSCGNASYGFSYSDIICVTQGDSSVEFEIEVDHDELTIFFMGQEYLALERMNMIFTLTLRNLLSNKKRTLLTLLTILLSISMITAILCGGWSLVDFLKEKEKVYGGDYDYYMEDLTWEQVQELYSQNNVGEVSLLRFAGNSFYGEKSNSTMLSVGEIDENFTQRFSLNQYLLAGRFPQDENELVISESFLKKNNMNTEIGDTISLTLGSRIWDEYNAQLSGLTNYRGEEESFVPTKEKAYVVVGILSDVNDSKIAANYNAFAGVDKTASDFAAYVKAKNLSNSIYTEAEEVAAAVDSHVAKFHSELLVYHGITGGKGAAKLIALVVMVICLLMAASASMISNALSISLQERIKQMGMLSSIGATKGQKRLSVYLEAFLLGVVSIPLGLVVGILLSALLLSVVRAAFGETFTFGIVELSLKVNGLILLVSGLSGIASLYFGSRKPVKQAAKITVIEAIRQSNNAVSKKKFRDGKIVSLVFGIYGSLAAKNIKRNPKRFRAITGSIFLSVVIALSLYSLSDFMLYQTSLDMKEDGSCYTDVISTIQYKDIPTAIGALSDENITADVSYSFQRYMTAEFSQEQINPDMQGYFINGTKAEVYVVGLDEEHFTSFCEENGFHIMTGSSNRGILLNQTMGYYNAGQNRVIAGSPFLIEPGTEIIPLGASEDALPIIVEEIVSEENANIQSMFVRDRAVLIVPLSYFNWLIDDNAYVEMRIQTAQHKEAMDCLADRGFPQTVDIAAATNNSRQVYTIAKLVICLFSILMTVIISLNVCNTISNTIHLRRSEFAVLRSVGMTAKGLKCTLLLEAVLYGVKALVLALPVSFLIHCAIYYFISSGMTPFAFYINGGIYALAVLAVGAMVCIAMLFAVRSVSKVEIVEELKLSNMMEILRVENICKTYEMDNAPVHALSDVSFSVDKGEFVAIIGASGSGKSTLLHILGGVDRPTSGKVFVDGQDVYEQNEDELAVFRRRQVGLVYQFYNLIPVLTVEENITLPIRLDGRKINKERLKELLSTLKLVKRRKHLPSQLSGGQQQRVAIGRALINAPAIILADEPTGNLDTENTRDIMKLLRESNEVYRQTMILITHDREIAMQADRILEIQDGRLVRDEVIRMDFIRNKEVKRQIVVSSILILFWGGIGIIVDSKAVWIVLSAIISSSAVSLFFTYQRYKKIADFSLHIDRLLHGDETISFGQFQEGELSVLHDEISKMTRRLIEQAEALKMEKGNLANALADISHQLKTPLTSLNILNASLCNEELTDEERYELIRKQTMLLSRMEWLIATLLKISKLDAGTITLKPQEIYLKDVVEKAIRPLEIAAELKMQTITQVIPAELKLALDADWTAEALGNVIKNCIEHSPESSSIEIKAIERPLLTQIIIADNGAGFRKKDIPHLFDRFYQGSGSTIGNAGLGLALAKTIIVNQGGVIQAKNRKSGGAEFEICFYRGTAMMSKLLLVEDDQSIVSSLSDYLGNEGFKIESASGQKEAIEKLDNDQYDIALVDIQLSNGNGFSVCSAIKERGTMPVIFLTASDDEYSVVAGLDMGADDYISKPFRPRELLSRINSVLRRTKNTQNIISYHDLVVDTNQATVVKNGTEILLSAMEYKLLLVFLRNKGIVLSRRRLLELLWDTTGEFINDNTLTVYMKRLRDKIETNPQEPEIIITVRGLGYKVGMAVTYKKLFHLMIDKGMSNAELMEQAGFSANIITRLKRDNYLSLDTIEKICNTLHCGVDDILEFIPNEKGNDARNPFSKENTMSKLTKYEKETIVLFNEADEEAHIQTYNAGLRKRLEAFSKKYPDLCRLDMSMGQGGVSYWIDKSRLSIRFQPPMSEERRRKASELAKQNGFNGQNGMNMNINEKKALYAFGCPNREATVQRLRLVAALAPDPAAKKLFFALAVKLNDKDCDRWYRCFFYNMRVEMERFAHHKYVPDSYPVPIMEGLYEMIMEAIFGGDMYPLENIVPQQDGYKAEVKAIADLMDELANRFSKADFSKVEELHQRMTIIQQYESTEHFKCGLSTGLLLMKEAYEYPLNPKEDMNELKARIHENGIDYVLVGDYYVPDLKLPEEKRPIGHWGRLHKAYLQNYRPTVYNELVLSCRLHSVLADLNEQANDRFSLIMEQMARAEGVTEQMKAENQMLWVQSMNSIRNRAEEIVKHEMIYCHYSGGGDMSKQKITALYERLSRDDELQGESNSISNQKKLLEEYAAQQGFTNCVHFTDDGISGTCFDRPGFLDMMRQVEAGNVDYLCIKDMSRLGRDYLKVGQIMEILRQRGVRLIAINDGVDSARGDDDFTPFRNIMNEYYARDTSRKIKSTFKTKGMTGKHLTGTVIYGYLWNETRDQWIVDEYAAEVVKRIFAMTIDGYGPYQIAKKLSEDKILIPSAYLAQHNEGVNKNKTFKDVYGWGSSTIVNLLDKREYLGHTVNFKTRKHFKDKKSHYVPEDEWTIFENTHEAIISQETFDLAQKIRSKVRRYPDGWGEAAPLTGLLYCADCGGKMYVHRTNNGKRISQYTCSQYTKVPCGTLCKTQHRINEDVVLSLVSDMLRAIAEYAKHERAEFVRVVQEAQSSQQTSEVKKQRTRLATAKQRVSELEVLLCKIYEDNVLGKLPDARYAVLDAQYAKEQAALTAEIATLEKAVGDYEKHEKSADRFIALIDKYQNFDKLTNTMLNEFVDKILVHERARKGSRETTQEVEIFFNFVGRFVPPAFAEVELTPEELEEIRKREERKDKLHQNYLKRKASGAQKRYEDKIKAAKKAEMDEKKNAIRAEDIARGVFIPVSNLPKREPQKGAITAMKKLKTPAQRPRKAPSNQTGGTAWGKKLAAEFSRMMQSADMKKLILLNFPYIIAFYMVEKAAWLYRHCNGDSVVDRLMVLFMNFGLAYKSVLPSFHPFDLMVGLVGAAALKAVIYFKGKNAKKYRQGEEYGSARWGNQKDIEPFIDPVFENNVILTQTERLMLSGRPKHPKYARNKNVIVIGGSGSGKTRFYVKPNLMQMPQKVSYVLTDPKGTIIIECGKMLSDAGYKIKVLNTINFKKSMRYNPFHYIRSEKDILKLVNTIIANTKGDGEKSGEDFWIKAERLLYCALIGYIWYEAPEEEQNFSTLLEFINASEAREDDEEFKNPVDELFEELEQKKPEHFAVRQYKKYKLAAGVVCFKRLIHHDMSKSLKTYKATKQKGDPHEQTENNRPVMQEEVNEKTISLCIKGGKITAQILKAALIKLLAEMDKKKQRGKGEKSQCKKTGRQSIKSLQKSGAQITNIVVTDNNIKSFDRVARKYGIDYSLKKVEQEGKTEYLVFFKAKDVDVMTAAFKEYTSETLKKQKRESVRQKLEKVKEELSNHRQLKKEKKREQEPIRMNFTDNPFERMMRQRPGTDSGHPCKHCRHKWECGYLLHQCRKKFRSVLGDTAPPAAGAVRPMNIVFMSLDTLPSTLWARDLYDQMHIRSDFRKWFPRMCQYGFIEGRDYEYMPRVRLQDEGGRTVQRYVKDYRITQDMAKKLCKLHHTAVGAAYHPQPFDWDALLGLLHKKPPRRSSYEAQLSESNSLVTTTQIAKEYGCGAKVFNRLLHLHGIQYLANGQWVLYSEHHGKGYTSSLTFRLQRSDGSEVEKLHTAWTQKGRKFLYHTLKRRGVLPLAEQGGMEYPYFKGLEADRYSFYRVPKALVKADLFQKMSGDAKLLYAVLLDRMSLSIKNGWQDKHGNAYIICTIEEVMDSIHCARQKAVKLLDELEQEFRLIERRRQGLGKPNLLYVKDLYAGLSQSNYWKYENHTSGSLKNELPGVPKSNGSNTEKINKTDNSETDLIYPAELQEEEQYRRYFKEALELEILEQGYPADKAVLHEILELLVEIVTSRKRFLRICGEEKPKEVVKSRLMKLDSSHIQYILECLKENSTQIRNIKQYLLATLYNAPVTVDSYYSAQVRHEFGWGGRVDKNMSFAILPQPVPAPYFSGVFSGKTRRMHIQCQKYLSGMAYSVFKELLMNFITLKELKKMVPIASEFKRVPGLKKILEDGIEVILRKQMENHAEVVVYKNGYVSYHAHERYTVFALHNCTHYYYESQGNEHQTIPHNHFEDMEWHIRLVLEGEDRLVRNLEARESETFSYAADVNPEYNNEMEDPRINVMDFVLNKEFLRKASELLKKHQWEMICRHYIEGMTHREIAAEMGVSHQYVTKGIKKGLHRIRCTYTMQAHYCAAFAHSVPAYITYCYGIALTNRYYIVDPKERLVELVGMSNGEHEIRTPKGLRIGNRSVVDGKNMLQIKRGGCEDYISAESLVECIHGLPVKSIEFFTAENQRKEAMLIIYAIFYHLLDYYTVKIVNMQAEKGEKRAEVQKVKLNRRKKKLKPTQRRPMKFGEKVRDLRKKHSLTQDELAQCLGINKRTIIGWERDGRYPRSIEMLEKMADIFHVPLTYLQPDQSLFIERAAEAYGKKGKIEAQHLAFELTELFASGELTPQDMDGIMYEMHKAYFKYREQKREKERIMNLMYSAFIHQAANELVQNAGTRNIKQIARSCSLDISETSRIKDMLGLLSLYFDKPLILINSHLDKQTKQMVCGYALGHYLEHQLLMDLHTLNKFLTIKDKHILLYEHNAFTSHLMLDSDEVYQMTKRGLDAAQISAAKRIHLNLVLVKLLELHHLGYDLRHYHAQHHAFINQFNLPAHFQFDVAAGMPRTKGSKNKPKTVTADFATQIAEKQSAKEALTAEIASITANIDTLKADLKEKKTALKKTQKEVATLEAKKAKADAKAAEEAKKTEAESVLKKLLAEGMSADEILAKLKMSKYFGTDGFRGEAGITLTADHAYKVGRFLGWYYNGLRERNGDTDPARIVIGKDTRRSSYMFEYSLVAGLTASGADAYLLHVTTTPSVAYIARVDDFDCGIMISASHNPYYDNGIKLIDCYGEKMPEETLLLVEDYIDGKLHVFDKDWPELPFAHREHIGCTVDYVAGRNRYMGYLISLGIYSFKGVKVGLDCANGSSWNIAKSVFDALGADTYVINNNPNGLNINNNAGSTHIEGLQKFVVEKGLDVGFAYDGDADRCLCVDEKGNVITGDHILYIYGCYMKERGKLLNNTVVTTVMSNFGLYKAFDEKGIGYAKTAVGDKYVYEYMAKNGCRIGGEQSGHIIFSKYASTGDGILTSLKMMEVMLAKKKPMSELAAPLKIYPQVLENVRVTDKKAAQNDEAVQTAVKNVAEALGDTGRILVRESGTEPVVRVMVEASDHDTCQKYVSEVVDVIRDRGYSLMPLFFLAAGWVYKEKTVLADIKRRIQTIVIPYFSFGFLVLIYWQLMERRFRDSDMSFMDSLFGLFSGCYDNLEFNIHLWFLPCFFVTVILFNILVNLGGRRMAYLVSALMSLAFIVVPMHGLIWGIDRVFKYIGFYAVGVFIAGKSVKAVKKKVKAGIVAIVLLALSFSLSCYHLTMGIMWFVTAMIGVAAVILISQLINENRILQYFGRISLIILCIHGPVYRIVVKIVSILLNLGTDAVRENFLLAMVVVVITMAICSTAYEVVVRLAPWMVGKKKVKENMKTVCAKDMCAGCMACINMCKKSAITIVDDYKTYNAVIDEVKCVNCGLCEKICPNVKCVEQVNPIFWKEGWALNPEIRSNASSGGIASSIIYSFIKNGGYVASCMLNKGEFVFELTNSTQRAEQFVGSKYVKSNPKTIYIDIERKLQEGKKVLFVGLPCQVAALKNFSRNQDNLYTVDLICHGSPSPELLKMYLKEKSVDIEELEGLNFREKTSFGLRSVGKNNGFPRIVDMYTYAFLKSIDYTENCYSCRYASQSRVSDISLGDSWGSELSEEEKKKGISLVLCQTKKGEELLKKSNVELFDADITRAIQLNHQLEYPSRIPSSRMFFFENLEKGFDFAMKKILPKEYLKNEIKIILSKVGIRRMQKLVSIIVPVYNVEKYIDKCVRSLLKQDYGNIEVILVDDGSPDKSGYIIDRLKEEDNRIVVIHQENHGVSSARNAGMAVASGEYITFVDGDDWVDANYVTYFVDLLEKSSCDVVMNKNNYSGCNDISKNNFSVISAEKAIEWIYLGDLFVAVWNKMYRRSVLEENYIKFNEKIWYGEGMLFNVEFLQHVNSVAVGESAVYHQTFNPDSAMRKFNLKSNLCGIKSLELQKEAWIKKNIDIEKAWEYHRYCFNRSIIDGLVRSNMILEYNETYKECVSNLRKNIFLPLKMEKSIKKKIMWXXXXXXXXXXXXXXXXXXXXXXXXXXXXXXXXXXXXXXXXXXXXXXXXXXXXXXGGVMGSESRNRYLLKNTLIFTLGNIGSRMISFFLIPLYTNVLTTSQYGTVDLITTISTVAGPMLTLNIAESVMRFGLDKDADKEKNTQCGSIVLLIAMIIGLVLIPICRCITEVSDYAMYVYFYVISLSASQLFLCDLRGKELLLKYSLGNILQTLMIAILNITFLLVFKMETGGYLLAYIIANFIVAIYAIIAGKGYKAFSFHNIDRCKLKEMIRYSVVLIPNTFMWWIMNSSDRVMVTYMIGAAANGIYAVSYKLPTLVSTLTGIFNQAWSYSAIREEGTSDETEYNNKMFKTLSAIAFMMGIGLLLLTKPFLGVYVADSYYDAWKYTPFLIIGCVYLTLGTFMATSYTVHKDSFGYLFSGSFGAAFNILLNFILIPVIGVYGAALATCISYIAVFMFRVFHTRKYIKYDIMYKEFILGSLLMLVSAILMFVDGMKGFLLQLVILLIGFTVFSKTWIPMLQFFLNKIQRKRVSMDKKIGIMSMQRIINYGSFLQAYGLKKMIESVSKSEVEFIDYRFGVDITNRLKKPQSKAESIVDKILKNRTPWNYLKKKNFFKEIERNLILDLKNIGVDKLNYDCEVDTLVIGSDEVFNCLQPYPVGYSKQLFGDGYAHSKIVSYAASFGSTRYEDLVDTGIAHEIKTMLSRFAAISVRDENSAHIVRQLLGYSPEIHMDPVLMYDFTQEIAEYTTYERDYIILYAYTGRLSREEENYIKKFAKRHNKRIICVGHYSNIADKNIICNPLYVFSYFKNADYVITDTFHGTVFSIKMNTKFCTLVRDSNRNKLEALLNKLDKLDRKVEKLEDIERLYNTEVDFYKTNQIIEQERKKTTLYLKENIMTPYIVVFMISIGLFALSDRVKYTQRKPIVFISVMALCLLAGMRAVGVGTDTRVYLMPVYEAAKRSHSIGEYLNSSFHAFTWTTDYVKDMEPLFPLLVLIVTKITGSLYCVQTILELCVILPLYVAVRKDKNTSLGMAMFVFCMAFYNPSMNMMRQSIAMSLGVLGFEYWKNAEKKNAFICVIIAFLFHTSSLLILLIYLLYDYIVKGTTLSITGNNVSKRNETPRMLISMGIGFVVMIMMSAIVSALSAVGFGEYVSYVTGKLVFMPNQLLIRIPQIILIIWSYRYLRKDGEDISFFLVMEVYAVLFSQFTSVSGYGGRIALYFAIFEVLVISQAMSALKPRKSGIIIRPLIIGYYMFYWWYYFVFVGAHQTVPYIFMRMTSLVSVVVPIYNVESYLKECVDSILFQTYKNIEVILVDDESPDSCGKMCDDYEKMDTRIKVVHKKNGGLSDARNAGMKVATGDLITFVDSDDYISKDFIEILFEAMLENKSDIAIANMKRTSKRDEKNTSTAWKTSNFKSEDALISMLYGIPFGTSACGKLFKRNLFKGVEFPYGKFSEDLFTIYKTILKSKSVTYVEFDGYFYYYRDEGSIVVSGYKEKHLEALDAVDDIAGAVKGKTQFDNALSTQYINVIYDIAARNPQPLEFRNKRIQSILKAHRINVLKDGNAPKRLRAFAAISLFGNRIALKVVVARNRKWKVMKKKALIVVNLAGFLHFLWNDIATLQEMGYEVSVAMNENSAAGPNLIEIPKLEEMGIAHYQVEFDTKSPVSTQNIQAYKQLKLILKTNKYDLIHCHTPIVGILTRMAARKYRKAGTTVIYTTHGFAFTDRSSKKSWIVYFTAEKLMSRFCDAIITINHEDYGNAKKMHCPKVYVIPSVGLDNHRFANLRINRDEYRASFGVNSKDHMVLAVGELSSRKNQKIIIEALGTLDRKEQYIFVICGTAVVNSTIEEELKETASRLGVRIFLAGHRLDIPEINACADVAVIPSVREGFGMTGVEALASGVPVVGSDVQGIREYVIPGKTGYLCDPYDAHQFAEAIENIVNLTPEARNQMAAACKKKAEEFDVSKSIAAMKNIYQEVLSNDRKYEEMKILLIHKFHYMLGGTETFHYNLAEALTAAGHEVIFFSMYDERNIPCAQDKYFVSNVDYNDPNLSTFKKIKMGIKLIYSFESKHNIEKLIRDEKPDIAHIGLLHRQITFSVVDVLKKYNIPVVMHLHELTAVCPCYTMLRQDGTICSDCATKGYWNCVKNKCMKGSLAKSVLAYIEAQFLRYGHYYDKIDLYIAECNFYKNLVEKAHFTHSPIIKMNNFLPINQEYKAYYEHDNYILYFGRYAREKGVLTILKAYAKMHCDEKLVLVGKGSEEERIKNFVKEHNLEGRVQVNGAIFGEEMDRIIERAKVVLVPSEWYENGAFVALQALAKGKIVVASDIAGLSEIVQDGETGYLAEPGNPDSFAIAIQKALNLTETEYRNMSARIVAYAKKRCDAENYIEKLCKIYEELINGKQHKENGMDQHLSIEKTGIQGLYVVNPASYKSDEDLIVETYNSQELLKNSLNMTFVQENQSMSVKGVLRGLHVQKNFPQGKLVRVVRGKIYDVAVDTRTTSSTYGDWYGVELSADNKKQFYIPEGFAHGFYVISDIAEVCFKVSDYWHPNDEIGIPWNDPELKINWPIKENEMPIIADKDLHYDSFSLLKEKLVQREEMCNGYYQKLKTGTYSIDAFYSKRYKRTVPFFALLILLNCVIEFTPKTVCEGLMEITMLFGFLPNNTLSTIGVAWTLGAIFAFYIIFPFIVFLLYSPKRGIVSFVISLVITYMCQCYFMTERFVTENFVMRHSFLYCLPYFLIGGIVYLYKDEIERFVNQFKVISLCVVLALTVGYYITPDVINSINIVVIKTLILYTGWLGLALGYDNRLMNNKFTNYISNLSMEMYLSHMVVFRIVEKIGIMERIESPVIRYMTTYLLLVMLLVMGLTIYRKAINKLDELRMNSKKEVQHVYLVGAKSLGAYGGYETFVYKLTEYHQNKENIKYHVACKANGDGCMDESKFDGVTKINDHEFEFHNAHCFKIDVPQIGPAQAIYYDVAALKACCEHIKKNHIPHPIVYIMACRIGPFASHFYREIHKLGGTVYLNPDGHEWMRAKWSAPIRKYWKISEQMMVKYCDLAICDSVNIEKYIHECYDGKGIQGSSPKTTFIAYGADLTLSKLADDDEKLMNWYREKGLTKKDYYLVVGRFVPENSFEVMIREFMKSKSKKNFAIITNVNEKFLNELEEKLHFKSDKRIKFVGTVYDQELLKKIRENAYAYFHGHTVGGTNPSLIEALGSTDLNLLVDVGFNKEVAEDCALYWSRKPGSLAKLIDKADRMSADEIAEMGRRAKKRVAEEYTWDKICGQYENVFVGKINNGMTHKKEQQIKIEGEFKPTVDCLCATRRRFVFIHKGIDATLAIKCEDGIEEMERNLRIAVFGQKRLSREGGVEIVVKELCTRMAQQGCQVTCYNRSRHHVSGAEYDDIDNTNYEGIRQKYVPTIEKKGARDIIGSTKKNYDNMATNTVGIDKEVEVNRKENLRDHRLYWIGRRTQDVILSSLALVVLSPVMLATAIAIVVDDPSAGPVFSQERIGRNGKPFKFYKFRSMCPNAEAKLDDLLDQNEMDGPVFKIKDDPRITRVGKFIRKTSIDELPQLWNILKGDMSIVGPRPALPREVEQYGDYEKQRLYVTPGLSCYWQIAPHRNDLSFEEWMDLDVKYVKERSFWVDWKIIFKTFKVCLLGRGEMGGKTSTASKRKWNNENYEYTQLVTQKGEKERIKQAAKQAGQSVNAYVVEAVRRRMEQEQMLSASDTPGVVKNLEGDADSVEMSINVLLTLVEQYKEAAQLIEAAQAEQEQLKIQIREALAERSTNYLEVGCHKVRLSDFSSTRLDSKAIKAVAPDLYDQYSKTVTGTRLSITMKQTVKTSRAAGQLEKMFRELNKHYFAGKLPEPIISLKKTLSAYGHITCSKVWQAGGENKYEINISSATLDRPIEETASTLLHEMVHEYCMETGIKDTSNNGVYHNGKFKAQAEAHGLTVDHHEKYGWTITSPSEELLDFIIFQGWQDIQMGERLAWSDMAGTGAGSKAPGSSQTGAPKPPKAKSSTRRWVCPKCGTIIRSTKEVRVICADCMELFVKADMDTYKIAIDTFLAETSECKASGCAVFSGADIAFQDIQLHTHRNKSELHFMAGHTMLSIPLASILSIEKLVLRDIQSTEYEIITKESGTITLDVVMTIISERLQHLRLTHGYTQTELARTMGVSRRAVYAWEHDKCPEIPHLIQLAQFYQVSTDYLLGLTEMAGAFSLFLGMLGLGAAGAVSAGQNAKIKKADYQYGEEHGLHGTSEVLQMRERVRKEWWNICGKTYNACERPASSYGDLSRTPWCYLKKRWFIDHLNKKGIPYDDLVVNDVTGVTFYESQKRTSQAYMRKLRMAENKILVQIIDHANGDSVLGQDYFESREKAEEFKRISDRAYGKLLGEGQTRITTAFIERMSDEEKRWPFDGFYLKLAEAQREYEQEQHIDPASLTEEERQQKLQEILDCIKASRKKKKVADEQLDPIVPEEEPETAGATPQPAKQYITDLVGEDYKNWHGIVVFDAGTNSGKTYFILKTLLPWAYEHRKRILILCNREALRNQIERDVNRLGSIEVSYEDYDPALGGIVDKTAIDNKYEHTIRVETYQWLETFLQRNEDAAKTYLRSFDYIVSDEYHYMVTDASFNDHVDASYEAIKELWTTKTCIFMSATARPFFDYWELRNMIPKGQHYRLPMDYRFVSSVKFFYRDDDELDIIRRVQPGEKILVFVNTIAKLRKLRDSLKAEGIEDVACLCSKYRQEAEEFDKLDDVLVGNVLQHQVTLTTTTLYNGVDMKDRALKYIVSELWNPLVNAQILGRKRPLDEGDTCAVYLLHYPKERLEGELKKIEKYQLEPVEAYRKWFDDRKAWKTYLHKPETVEILKKSHTVVLDPREGEYCWRKRATLQARVERVFLLQMLEQGYQTELLKKIDESLLAKVERLEPPPLLEYLDDHLNEERYYQDWQKIFFELGHIYNKADGHAEKSLPSYTFARQWLQQYGYDLGSKQKRFEAGQKKMVWWVTKLENMILGFFFSFHFLEVLSGREGFFAKKGGVSLVHNRDLRPAAKANPTIQQAFERFQKYNRLKNLSQGSLDFYAAKGRSFFRFLGDTEQPIHTITEETVEDYIFYMKDQQLHDTTINTNLRMVRAFLYWCMEKGYLEKYPIRLVRADDPIKEPYTTDELQKLLKEPDCKTCSFAEYRNWVIVNFLLGTGCRASTLLNLQIGDLDLSAGTVFFRHMKARNQQIVPLSKALVKIMEEYLEHRTSDPTAPLFVSEYGNQMTLNSLGNAIWNYNHSRGVDKTSMHLFRHTYAKLYIQAGGDPFRLQKLLGHADLTMTRRYVALYADDLRANYDALNPLEQLTRQNRHGDKIKMGKGERKMNEIKVEPYIPDEDYDNPAMVVDFYEFTMANCLFLHGFKNTTLVFDMFFRKNPDNQGYSISAGQRKLTRFLLEYHFNEQDIHWLRTKGMSEEFCEYLRTYKWKGDMYALPEGTVCYPHVQMVRIECDLVGAILIETYLLQTMNFHSLIATKATRVTGLNTHTPRNVMEFGTRRAQGESAGNDGAYAAVLGGCIGTANCLAEMKFGAEVKAVGTVAHSFIEFFPTEFDAFKAFADTYPDSVSLLLDTYNIMESGLPNLIKLDDYLIEKYPNDPNRRVKSARIDSGDLARGSKRLRKALDAAGKPYIKLVASNGLDEKKIANMELYEHAHFDSYGVGENLITSASDPVFGGVYKLVAVKKPDGSYTPKMKCSDSASKAIIPGKKMPWRLYDENGQAQCDLIAMDGEVIEAGKPVTMVNLDSDAIERTITFIPTAVRPLLVPHILGGELAIELPSIAEKKAYIAKQLTEETWESELRLECPHKHYVNMTPAVAECRSRMYAELHGGKVMAYFYEEPSRTFGEYLLVPGYSSAENVPTAVSLKTPLVKYRKGQEECPLQMNIPMISAIMQSVSGDKLAIALARQGGVSFIYGSQSIENEAAMVRRVKSFKAGYVVSDSNLAPTATLHDVLELKARTGHSTIAITADGTPNGKLLGIVASRDYRVNHTPDDACVTTFMTPVEKLVTAPANTSLHDCNNIIWDNKINTLPLVDAEGNLVYMVFRKDYDSHKANVNELLDKNKSYVVGAGINTRDYAQRVPALVEAGVDVLCIDSSEGYSEWQSRTIGWIREHYGDTVKVGAGNVVDAEGFRFLAEAGADFVKIGIGGGSICITRETKGIGRGQATAVIEVAKARDEYYKETGIYVPICSDGGIVHDYHITLALAMGADFVMLGRYFARFDESPTNKVRINGQYMKEYWGEGSNRARNWQRYDLGGSTKLSFEEGVDSYVPYAGPLADGVQTTLYKVKSTMCNCGALSIPELQQKAKLTVVSSTSIVEGGSHDVVLKNATPSIMNGMHSVSLIWLAKVILQKSKYDQCPKTLVNLSVFPQRTIIKFGAAGVCILAGFVVKYIQSIYKQQTMKENSRRRRTRAQYPKKQEEKDFTHSLGGFALAVTILMKKKLGIVGCGFLGNIVADAWKKGLLPDYELVGVTSRTRASAEKTAANVGCAVCEDVDALLALEPEYIVEAASVESVRAMAIPVLKRGVNLVILSIGAFADLDFYAQVKAAAVEGGAKVHLASGAIGGFDVLQTVTLMAQAQGLPETAGIETHTGAKGFRNTPVWAEHLLTDTEKTTVFTGNAKQAIATFPRRVNVAVATSLATTGPEITSVTMHSVPGWVGDDHCITAEIEGVKAVVDICSSTSAIAGWSAVSLLRNLASPVCFYMFEKLVAIEPVSLIPSAEEELHRYAKEVVLYRDVPASDAEMVRRIGDADAVLLSYTSRMGKEVIAQCPNIRYIGMCCSLYSEESANVDIAYARTRGIQVLGIRDYGDRGVVEYVLHELTGLLHGFGMPMLRDEPVEITGLKVGIVGLGVSGRMIADALQFMGAEISYFARSAKPDAEAAGMTFKPLPQLLADSEVVFTCLNKNVLLLGENEFAQLGAGKVLFNTSIGPGFDSAALEKWLDLPGTRFFCDTRAAAGPVAEDFFSRENVRCANVSAGRTKQAFVLLSKKVLDNIRTALGEMKTALTIAGSDSSGGAGIQADIKTMTANGVFAMSAITALTAQNTTGVTAIFDTTPQFLAQQLDAVFTDIYPDAVKIGMVSSAPLIDTIAERLYFYGAKHIVVDPVMVATSGAKLLQDDAVQALTEKLLPLAEVLTPNIPEAEILSGMSIANAADMEAAARTISERYGCAVLCKGGHQINDADDLLWQGGTGKWFKGKRIANPNTHGTGCTLSSAIASNLAKGYDLDTSVERAKAYISGCLSAMLDLGHGSGPMDHTFNLKGDFVRDMTDLPFVSALVQADLPVWEQCLQTDFLQKMENGTLSEDCFKSYLVEDSLYLREYAKIFAWGMTKATTMAAMRTYYSLLSFVQENEDLTRLRYLEQYGLREADIQSLPLRPESRAYLDCMIDAARTGEGEAECLMACLPCMLSYGWLFQKLLQRSPAVKDTYYGALVLDYAGPGYDAACRAWAERAEAACTGLSPERAARCRAIFRACSEHELHFWEMCATPRTDIMSMTTPIVDFVRSYAQSGTARLHMPGHKGQSLLGFEPLDITEICGADELYAPEGIIAESEANATRLFGTAHSYYSTEGSSQCIRAMLFLALQSAPQNGKRPVLLAARNAHKALLYAAALLDFDIRWLWPSAQAEGALCSCPVTAEALTGALHALAQQEITPFGVYVTSPDYLGGVQDIPALAAVCRAQGVPLLVDNAHGAYLRFLPQNCHPIAQGAAMCCDSAHKTLPVVTGGAYLHLAHDAPVQDEAAVRGALALFGSTSPSYLILQSLDACNAVLAGDYPRRLVQCCAALEGLRRSLNKAAAARQCPVPLAVAGAQQEPMKLTLDAAALGCTGTALAEALRRAQLECEYADPRYVVLMFTPENPPQDYTRLQTALEQLLAAVPAVLPRPENRAGEFAALQQQAVQRCTIRQAVLGAQVRIPVHKALGRVCAMPTVSCPPAIPVAVSGEEITPAAIVLMQRYGIEELSVLRMVHQYQLNGYNIVLDTCSGSVHVVDEVAYDVIAMYPEHTADEIVAAMLAKYGSRPDVTEEDLRQCIDDVTSLKENGKLWSPDVYKDMAFDFKNRNTVVKALCLHVAHSCNLSCSYCFASQGRYHGDRALMSFEVGKRAMDFLIENSGTRRNLEVDFFGGEPLMNFDMVKKLVAYCREQEKIHNKNFRFTMTTNGVLIDDDVIDFCNKECHNVVLSLDGRKEVNDRFRVDCAGNGSYDRIVPKFQEFVKKRGDKNYYMRGTYTHFNTDFTNDIFHMADLGFTELSMEPVVCDPSDPSALTEADLPILKEQYEILAKEMIKRDREGRGFTFYHYMIDLTGGPCIYKRISGCGSGTEYMAVTPWGDLYPCHQFVGDPKYLLGDIWKGVTNTAVRDEFKHCNAYARKECQDCWAKLYCSGGCAANSYHATGSITGVYEYGCELFKKRMECAIMIKVAENQELAAKGIEVPIELGSTCNACADGEACEMERIKTIATRDLTKSVKTGGCGECQTSCQSACKTSCGVANQQCENSNKMPERTTQNAQTLLSPRVPRDTEHERYHPELEEELKECLFCLKRNEMMFDMEVDTDLIEQRIYERQALLCRYRYLLARARELGLHTVLTRYQPMGGMKQLISRRSFLKAAGVTAAAASMAIGAPAASACWVGDKSDVTILYTNDVHTYIDKQSPKLTYAAIADLKQSYQNAGKDVLLVDAGDHVQGTAYGSMDEGASIIKLMNAAGYDVATPGNHEFDYGMDRAKAIMKEADFPYLSCNWVDLRTTLRVLPSVKVFVRGGRRIAFVGVTTPETFTKSTPAYFMDKAQRKYIYDIQGGEDGKKLYDAVQKAIDKAKLLADVVIGLGHLGVDPSSSPWTSEEVIAHTSGFDAFIDGHSHTVMENKQVQDASGKAVTLTQTGSYFANVGEMTIAADGTITTKLIPTHEGMDAGIAAMQTGWVNTVDDMLGEKIAVGDSDFYVSDPATGKRRIRSAETNLGDFVADGIYTYFNEVEKLHCDVAIMNGGGIRADVPAGDWTFKTCKQVSPFGNVACLMSVTGKQIQDALEFAARFAGEDGKENGGFLQVAGATYEIHTDIPNTVQTDEKNVWIGSATGTPRVQNVKIYDKASGSYLPLDPGATYALAGMNYTLRNLGDGFAMFDGAELIKDYVSEDYLVMSTYAMIFDGADAAGLPHLSSANSPLAAYPGYLLNYEQPYGAGRITILMYYSSGNYEAFAHPKKPEGVDHKSAYIIGSGLAALTAACYLVRDGQMKGEHVHVFEKNALAGGACDGYKYDIGYVMRGGREMDNHFEVMWDMLHSIPSLETEGASVLDEYYWLNKEDPNFSLCRATVNRGEDAHTDGKFGLSDKGAMEIMKLFFTPDEQLQDKKITDFFDDEVLNTNFWMYWRTMFAFENWHSALEMKLYLKRYIHHIGGLPDFTALRFTRYNQYESIILPMVRYLEGFGVQFHYNTKVTDVKFDIQKGRKLASSVTVEHAGETSNIDLTENDLLFITNGGCVESCTVGAQDKATGFDPTIQPGNGWDLWKKIAAQDPSFGHPEKFCSEPELSNWESATITTLDDKIPQYIRKICKRDPFSGHTVTGGIVTVKDSSWLISWTLNRQQQFKDQPKNQLCVWVYGLFSDKPGDYVKKPMRDCTGREICMEWLYHIGVPEDQIAELAEHSANTVPVMMPYIDAFFMPRAMGDRPDVVPEGAVNFAFLGQFAETARDTIFTTEYSMRTGMEAVYTLLNIDRGVPEVWGSTYDVRALIDATVKLRDGKKITDMDLPLIPRLALKEALKKIEGTDLEKFLKEYNAIMSKEFSFPNKGTCSKQTNFVLNDDHTIASIEVVGGCNGNLKGICQLLTGMKAEDAIARLDGTLCGFRSTSCPDQIAKNLKKALEEMNMSCDLHIHSTCSDGAVPIERLASIAARTGLHAIALSDHDTLLSAQYAYAHTGQDGVELIPAVELTGYDFERQHRVHLLCYYPDVDCPALREHCAIMKERRNACALQSAKELEQLYPQFTTDLAWETTKASGVLFKSGLMQALELLGLTDGSIYGETYHKLFGWNPRGIVLHSPEYLPVRQVLATAKACGGAVAFAHPTVYKSMPLLRELAAEGAVDGIEVYHPSNSAEDSAECLALCKQYGLVATAGTDFHGRNHKHPHPIGTCTAPDEAAAQLRAIAEKRKRERTMLDMIKCSTGGAYYARGEWVPADGNAPAALAAKGFDAAAVAAAKTGTMAYNIMQAHNTSGDAENLKIKFDAMASHDITFVGIIQTARASGLEKFPIPYVLTNCHNSLCAVGGTINEDDHRFGLSAAKKYGGIFVPPHMAVIHQYMRERFAGCGKMILGSDSHTRYGALGTMAIGEGGGELAKQLLGRTYDVARPGVVAIYLTGSLPVGCGPHDVAIALVGKLFKSGYVKNKVMEFVGPGIASLRQDTRNAIDAMTTETTCLSSIWETDEVTQRFLAVHGRAADYKKLTPADLAYYDGVVEVDLSAIRPMIALPMHPSNAFTIEELNANLEDILHACEQDVQKLIGREDVQLDLCSKIENGKLRVDQGVIAGCAGGLYDSIYEAASILKGHTGGCGDYALSVYPGSQPIMMELVRTGVIGELMASGATIRTAFCGPCFGAGDVPANGALSIRHTTRNFPSREGSKPGSGQLAGVALMDARSIAATTANGGILTPATDIDYDPTVPEYQYDASSYDTRVYQGFGKGDYDALLKFGPNIKDWPEIAPLGDNLLLKVASYITDPVTTTDELIPSGETSSYRSNPLGLAEFTLSRKDPEYVSRAKAVQAEEAARRAGAGDAALLAKVNAVPGCEQLRWNDIQIASTIFAVKPGDGSAREQAASCQRVLGAGANIVTEYATKRYRSNLINWGMLPLQLAGATPFGLGDYVLIPNVREALKGDLQNIKAYVLGDTVKEFELYMAPLTTDERQILADGCLINFYKHMTKDMTQGSPLKLLLAFAVPLMLGSLFQQFYNLADTIIVGRFVGVEALAAVGSVGGLNYLVLGFVNGIACGFSIPISWTFGAHDHHEMRRYTANTVWLSIAFATVLTIVTVAMTRLVLVWTNTPADIIDLADIYIRTIFAGIPFTLLYNVTSALMRALGDSKRPLYFLLVASVLNIGLDLACIIVLNMGVFGAAFATVFSQAVAGIGSLIYIMRHYPELRWNKEEGRISAPHCAKLCAMGLPMGLQCSITAIGSVVLQGAVNGLGSDIVAAQTAGGKAAQFLCVPLESIGTAMTTYTSQNMGAKDLGRVNRGVNTALGIGCVYSVASFLILRVLDKPLIGLFLDAGETAIMANAQDFIFWNSVFYIPLAVLIIYRYTIQGLGHSGLAMFAGVAEMIARAMVGFWFVPLWGYFAACIASPVAWLFACFFLIPAYFVVFRKLQKEKQQEAAAKVQMALLEASGIGKNFGDTKVLKDISLTLEQGEALAIIGSSGSGKTTLLRCLNFLERPDTGCIRVNGETMWDAADPATQRESEIRKKRLHFGLVFQNFNLFPQYTALQNVMLAGELLAKERPDYRANKKAVHAQLEQQARELLAQMGLSERADHYPHQLSGGQQQRVAIARALALHPDILCFDEPTSALDPELTGEVLRVLRELADRKTTMIIVTHEMHFARDVADRILFMDGGVVVEEGPAKQLIDHPREQRTKQFLAHYAEMSVILGRLSGAFLLNCELFALTLLFALPLGLVVAFGSMSRCRLLSGAVKTFVWVIRGTPLMLQIIVIYLGPGLLGMNNPWPSGSGGRMVAAVVAFAINYACYFSEIYRGGIEAVPKGQTEAGQVLGMTRTQIFFKVTLLQVVKRILPPMGNEIITLVKDTSLANTIANKEIIMMAKEYSAKGLIWPLFSTALFFLVFVGALTLLFNWAEKKLDYFRCMKLKRIASAFLAGALALSLAACGGSASTSAAASASGSAAGSTSSAAGSDLDYIKGKGKMVIGYTVYEPMNYTDVDGNFTGFDTELATAVCAKLGVEPEFVEINWDTKVVELDAKSIDCIWNGMTLTEDIMANTATTKAYAKNAQVVMVKEDTAYTSTADLAGKTVVAEAGSAGEAAIQGDENLAKADYVSKSVQTDCLMEVAAGTADAAVLDLTLANAMIGEGTDYAGLKIVDELNAEEYGVAFRKGSDAAAAVDAAFDELKADGTMQALAEKYELALADMKQASRWFLCCTLAAALTLTGCGGGNSGSSSGSVSGSTSAGSSAAQSAAWRTGLGVLTETTGTDRAGNIHTVAAAVLLDADGKLAGVTLDELELSVSADSTGKVTTPTDTRTKRQKGKDYPLAEVSGLKKGWAEQADAFGSWLEGKTPEEVKKLKTDADGKPTDADLLSGCTIAVDRYRDAVVRACENAQVLGAARGDTVKLGVEVAEMPQGLAGTDDKDAQVQAKVTLAVVTMDENARVTSAIGDMTEPELTVSADGTVSAPREPVYTKNELGDRYGMRSASALGKEWYEHSAGWCGYLKGKNAVEIGKLSADGTDADLKALCTISVTDLQKAALKAMAEQMLFRLPIVKFFNRILNRITVTVVLVALQLAWLAWVFFALTTGTARVWVTGVLNGLSLLIILYLVRKDENSAYKVGWIALIGLLPLLGGALYLAFGNKRPSRRLRSKMQAVEQAHRADRAQQPGQTAGLCDENRGVSRYLTQYGCYPAWKNTTARYFSCGEAMYPALLADLEKAEKSIFLEFFIISQGKMWQGVEDVLRRKAAQGVDVRLIYDDFGSLLGLPKDFVVRMERAHIRCIPFNPVVPLLSLVMNHRDHRKIVVIDGKVAYTGGINLADEYINAITRFGYWKDAGLRIEGAAVWNFTVMFLDFWNAFRPFEQDYSTFRPQLAVLPASDGVVQPYADSPLDEEPVAETVYLDILAQSQHYVYFYTPYLAIGEEMLDALRNAAKRGVDVRLVLPGIPDKKLVFRLSRSYYLPLLRAGVRIYEYTPGFLHAKCCVSDDRAAVVGSINMDYRSMFLHFECGVLLLQNSQVLALRDDVRRTLYQCREVQCADCRTGLVGTVLDSVLRLLSPLMMKSKIVVDSSANVYELPDVGFACVPLKILTDEQEYVDTAEVDAPALAEMLRTYKGRTSTSCPNISDWLTAYEGADEVYVVTITGTLSGAYNAALLAGEEYEQSHEGARVFVLDSLSTGAESRLLVERLAALIKAGKPFDTVCEEIRAYHEHTHLLFALESLANLARNGRVKPAVAAVARMLGIRVIGQASDAGDLEVLCKTRGEHGALERMVLEMKAHGLTNGRVHIDHCCNAAAAERLKHMVHAVFPEAKVEVGSCGALCSYYAEYGGLMVGYEDNEAPTVMRYTISQAEVLLRKAIALPLHKNNVPACKKCRSMNGTRYYESMKAETKLRVAACAAGFALPRYNDLPSVGLYLDQTVQFINGYFRSFCGVELTPSMVSNYVKKGVVDHPIRKKYTRDQIASLMYIAVSKTVLSIENIDTLFKMQREHCSAGTAYDIFCEELETSLSVVFGGKTAQPEATLNDERLLLRSTIFAAVNKMYLDCCFDALRQEQALWSDILPDLAMAPTKERPATKSIATNREARHEYFVLEALETGVELKGTEVKSLRAGGVNLKDSWVDIEDGELLVKGMHISPYDHGNLFNQDPMRVRRLLAHKSEIRRLHQQCKLQGYTLVPLSLYFKHGRVKMEVGLCKGKKLYDKRADAAQRDAKRSIDRAVKSNGKYYMDYTAAPLEKLIEEFGKFQGVGRKGATRMAYQVLSMSDKDAAALADAIRGAHTRLHRCRICQNFTDADLCPVCASAKRDTSVICVVEKPRDVQAFERTREYNGLYHVLHGLLDPLAGVGVEQLTVKELLARLKDDTVKEVIMAMNPTVEGEATAMYLAKLIKPLGIRVTRLASGLPVGASLEYADETTLYRALSGRGELMKARMPAGYGRPDMNALMRQAQKMQEDMKSKQAELEAAEYTGSAAGEMVTVKMNGKHEVLSITIKPEAVDPDDIEMLEDMVAAAINATVKQVDETAEAEMGKLTGGLNIPGLMYRALYRKWRPQRFEDVVGQRAIVTALKNQITAGRVGHAYLFTGVRGTGKTTCAKIFAKAVNCLHPEGGDPCGECEICKGIDNGSLLDVVEMDAASNNGVDDIRDLRDETAYTPSACQYKVYIIDEVHMLSTAAFNALLKTLEEPPAHVIFILATTEIQKVPATILSRCQRYDFTRIGPEDIARRVEYIAGEEKLELTSDGAELIARLADGALRDALSILDTCAGVTAKIDADVVRRMAGVTDRSYLFHISDALEAQDAAAALAQLAQLRQQSVDVKRLTEELIAHYRALMLAALPGGQALLSGVSPEEEALYLQKGPEMGQREAIRAIRTLGTALEHMTRGSDQRIELELALFSLSEPPQQMQTVTVQAAPARAAQPEAPRPFAAAAQPFASAPVQSAPAAAAPQTPAVVEEPAPAVQQTPPQPAAQEAPPAPAEELPPMPEEPPVQQSDAALPWDEPAPQAPPPEESEPVTQPEQPAPAEPAQSAPAAEETPAPVQEHPADPVLTKPRSVAQQGTNPFPYWGQIVQKLEGIDPMLYMYLRKSKAYFDGTRVLIDGGKTFRDFIRVNKDSQKLIKKLIAEVSGVPVPIGPYEPKTAGKTASNAEQSLLALEKLGLEVSIEDTARKKRMADMFAPLVAQLKANPKTIVFTEGNDPRILEAASKLLAEGVLKVVMVGNEAECKAAAAAGNFDISAAEIIDPENYAGFDEMVSTMVELRKGKQSAEECTALLKKSNYFGTMLVKMGKADCLLGGATYSTADTIRPALQLVKTKKGAHLVSSCFILDRDCGEEGLKRIAMGDCAVNIDYTDTVDKATGEVKISAASKLAEVAVETARTAKLFGIDPKVAVLSFSTKGSGKGGTVALSHDATIKAQEMDPELAVDGELQFDAAVAPEVAQVKCKGSKVAGQANTFIFPCIEAGNIGYKIAQRLGGYAAYGPILQGLNAPINDLSRGCNADEVYKMSLITACQSMDMDTLKAECLACTRCELCATRTNVVFGQGVPDAEVLFVGEGPGQSEDEQGLPFVGRSGQLLDKYLFAIDLDRKKNCYIANIVKCRPPQNRDPLPAESEACMPWLREQFRLLHPKIVVCLGRVAAQRMIRQDFSVTREHGQIIEKGGILFMGTFHPAALLRQPQNKPEAFADFTVLRDTIAAVCEHTYHKMESSVHPSVDFFLGATTPAGFKGYFAPLRREPGMQLVLLKSGPGCGKSTLMKRLARAAQDKGEPIQRIHCASDPDSLDGVVFLRQKRAIIDATAPHVVEPEAPGADERVLSLYHTIDADALHPHKDEVTALFARNQLLRSRAARYVASAGSLLLDSRRAEACSANFEKVRRYVKRLCIRLLPRTEEMGSEELRLLSAITPKGEVFYQGTVQALADKCILFRDDYGAVSRLLLELIRAEALARGYHIITCPCAMHPEDKIDHIIIPSLRLAFLTDNRWHPVRLSAAQTVRCSRFVDRENLSACRARLRFNERAAAELLEQACALMAQAKSCHDELETYYRTAVDFAQVDAAAAQCMELFGVRMASIHLPIRQLVEFLLRTGSIDSRFAGFDRANEGARIHRKLQKAAGEGYQAEVFLSAEREACGIAFTLEGRADGIFTDENGTVTIDEIKTTTVPYEEITEELNPCHWAQGMVYAAIYGSQQGLDALAVRLTYYQVDTDQIQRFTRQFTRQQLEQFLQQLLAQYAPWAQRQLDWDTRRSQSLAALQFPFAAYRPGQRALAGEVYRACRAGKSTDRKGGTRVFCQAPTGIGKTMSALFPALKAMGEGCGAKLFYLTARNTTQAAAEDAVARLRAAQPGLALRSVTLTAKEKACLHPDAEGHPSCLPEVCPFANGYYDRRKDALAALLDGSGSFSRAALADTARQFSVCPFELGLDLSEWCDVVIGDYNYLFDPVVHLKRFFDAAGDWLFLIDEAHNLPDRARAMYSAQFAKSSLTEAKRALGKGKSSLKTALTKADKVFLAVRKACAQAAPRTGAEPAGETEPTQVSLLPAEAAPDFALPQPLYARDGTVFLQQLPAALPAALRAVHTPLQDWLEQNPEDPAHAQLLELYFALQDITRAADRYDSHFVTQLTARGSELELHLLCLDPAPFVDASLAAGRSAALFSATLTPPAFYRSVLGCADARAVALPSPFPPKNLGLFCLPGISTRYRQREASVPAVADALAALAKGKTGNYLAFFPSYAYLQQVYEAFAARWPDIPTLVQQRSLDDAGRAEFLAQFAPHPANTLLGFAVMGGIFGEGVDLVGDRLIGCAIVGVGLPQVNPRQEMLRRYYEEQSGCGFDYAYRYPGMNKVLQAAGRVVRTPQDKGVVLLLDDRFAQPDTARLFPPHWQHIQYLPGTAALETALKGFWDVMESLGLLHLYYGDGKGKTTAAMGLALRALGSGKRVVIVQFLKGGQSGEIPLLEQLGATVYRGKAGQKFVFQMNEAEKAATRDLQNKNLAAALAQPCDMLVLDEAGSAWELDMVDKALLQQAVLHRPAGQECVLTAHAAPAWMLDAADYLTEMCCRRHPYQKGIAARKGVEYMYKDMMDTIGMVNAADPELGAAMERELTRQRENIELIASENIVSPAVMAAMGSVLTNKYAEGLPGKRYYGGCVYVDEVENIAIRRACQLFGAKYANVQPHSGAQANLAVYFALLELGDTVMGMDLSQGGHLTHGSPVNMSGKNYHFISYGVGADGVIDYAELEKQVRKVRPKMLVAGASAYPRAIDFEKLAEIAHGYGAYLMVDMAHIAGLVAGGQHQSPVPYADVVTTTTHKTLRGPRGGLILTNNPIIAKRINSAVFPGTQGGPLEHVIAAKAVCFGEALKPEFKEYARKIVENAQALAAALQQRGVKLVSGGTDNHLMLIDLRDEECTGKDLEQRLDSVHITANKNTVPGETRSPFVTSGVRLGTPAVTTRGMGAAEMQVIADCIADCIWHYEEKKDEISERVLRLTREFPLYQMVIQNTSLHLWGKKLEKYTKSTAHFYTNIINTSDKKSKPFGEKRIEATAAFCYDYLTAANAARVLRMTIAEEKQAQRTAGRAARKALDAPQRAAANAALCRRVLELDAYRAACTLLLYAAFGGEADLAAVAAEAARQGKTVAYPVCGEGFSLTAAVPGADGWAVGQYGIRTPVPERSTLLQPEQLDLVLVPCTTFDAGCRRVGMGKGYYDRYLPRCTRAVKIGIALEVQRVPRAAVDAHDQRLDAFVTERGIYTWKMEMNDLSCAQFLAQLASKAPTPGGGGTAALVGAAGVALGNMVGCLTAGKKKYAVVEADIQALNARAEALRLELEALVHADADAFAPLAVAYGLPKDTPEQAAHKASVLEAALDGASAVPLQIMEKCAEGIALAGQYAAKGSVLAVSDAGCAAVLCKAALQAASLNVFINTKLMADRTRAAALDARADALLAEFVPWADEIFTAVSGKLRNKMATILKGAPVVAAMNERNAALCEQLKAKGITPTLAVVRVGEREDDLSYERGVMTRCGKVGVAVKQFVLPADATPEQLLRVLDEVNTDDGIHGCLLFRPLPKQFDDRTIRAALRPEKDVDGITDGSLAGVFTNTELGYAPCTAQACMEILKYYNVPLSGKRAVVVGRSLVVGKPAAMMLDRENATVTLCNSRTQNLPEVCKQADIVVVAMGKMAAVGADCLRAGQTVVDVGIHVNEEGKLCGDVQFDAAEPVVDAITPVPGGVGTVTTSVLVSHVVQAACKKAGVECMIQMLTSVIGQRGVDAMAFLLAFVLTALTDSIFRDKLPHDHGRAFAVNGELSKGKARGSGLIFVLCIALVSLAFLPFNTEYVVYNVLLIASMLSGYLDDAAETAWNEYKKGIIDFVIAVLAGVTYLNFNGCGVHFLQWSFTLPYAVYLLLIVILIWASINVVNCTDGVDGLSASLAVVTIGTYLLAYKTELGTYATAGVVFIGALLAYLWLNAKPSSLLMGDAGSRAMGFFIAMLSLKCGHPFAFLLAAIVFIADGSLGILKISLKRFLHIWILKNTLTPLHDHVRKRKGWSDEQVVARWLILQCVASALLLLLVRGMSITLEQLSARMRQGEQVPLRHTAQVALTLSIPSILQQIVVTAMEYIDAAMVGHIGAAATASIGIVSSSTWLLHGMLAGLCMAFSIQVAQYLGADRQQDARGVLRQSMLFNLAVGLAAAAFGVGISRFLPGWLGADAALRANASAYFAIWSASLPFIMAMGTYAAMLRSTGDALTPGLISIFTCVLDIIFNFFLINPTREMTVFGQNLTVWGLGWGVPGAALGTALANAVGGTLALGVLLLRDGPLCIRKPGSWHITRACLHNVWKVGAPLAAERAALSSAQVLLVRIVSGLGTTAIAANSLGVSAESLCYMAGYGIQDAALALVGQAVGANRRDMAKRFAWLCTAMGMGIMALTGVGLYVFAPHLMGIFTADAAVIALGARVLRIEAFAEPMFGASIVASGSMQGAGDSTGCFILNLVSMWGVRLTLAVLLAPRFGLVGVWVAMCAELCTRGALFLLRMARGKWLDKGALAMARVVSEEEASRLMTVYNNQYNQKAEATLQLLRLFLCLKNMKKNTTHNLTVAAMLSAVAFILMFIEFPLPMLIPSFVKMDFSDLPALLGAFALGPVYGVVISFMKNLLHIIIKGTSTACVGELCNFMLGAVFSAVAGFVYKRHKSRKTAILGAIAGAAVMAVFSVPSNYFITYPAYVQFYHMPLEAILGMYQAILPSADSLIKCLVIFNMPFTLVKGLLDAVLCLLIYKPLSPILHGRKMIFSIRNLGFELGSLLLEGWAAFAARVVCAALLLALGWLARQLLSRRVFPALLRRNWRLAGTPILLRSFAVPLQRLTLAAFIYAAAASLPWAIAGVNKFLLTVFELAATFFVCQGLYAAADLTDLLLASCGEEVRTNRTLTTLLNKVYKVLIVVLGVMTMAQESGLPVGSIVASAGLVGLTISLAAQDSAKNLFSGLVILLDRPFSIGDWITVGDVSGEVVDINFRSTKVRALDNSVYILTNSTVSSATINNGTLRNKRLYRFTLGVTYDTSRPQLEQLMTDLTAMLKASPYTYEDSVLVKLNGFGASSIDLLVSAYLRTADMTRFLQMQNDLNLDLMDVMQKNGVDFAFPSTTVYLEKNNMTQLLLPIIYLAFISLGLPDSLLGSAWPTMYPQLDVPFSYAGILSMIISLGTIVSSLNSDRLTRALGTGRVTALSVGMTAAALFGFSVSGQFWMLCLWAIPYGLGAGSVDAALNNYVALHYESRHMSWLHCMWGVGTTIGPVVMGAALSGGLSWNSGYRYIALFQIALSAVLFCSLSLWHKRPDATPDGTVPKALTLPQVFALPGAKEVMLCFFCYCALETTAGLWASSYLTLVRQVPAQTAASFASLFYIGITVGRGVCGFLTLKLSDDQMIRLGFAVLGMGIAALLLPGAQVFALAGLVLVGLGCAPIYPSIIHATPAHFGTQNSQAVIGIQMSSAYVGNLAMPPLFGVLANNITPALFPFYLLVFLVLMALMHRQLVRKTAHIMSTKFSRKTFLKGSVAGLGMMALNVCTAGAASAAEPAAAAAEDTNSLNLVPKKAASVKVTSRGSVSGGWQGEPVFPNWKGLDDTLAMNHMYTFVGYAGQGTLCVEPEAGVTGFNLFVNNRQINTAAMAAGGVWNVDISGQTINGRNTIQVGGIRPRGKKVTVRVGYPTVQGGSLQDVGIDRDALELLEQIIQADVNNGFPSAQMAIVKNGKLVYQNAWGKVNSYNPDGTPKTDSPAVTNDTLYDLASNTKMYTANYALQYLVTQGKANLDSRLVDLLGSAFVEDTIDITYNGYENPGLKVNKQWKAELTLRDILRHQAGFPADPQYHNDSFDQCAQKTVPGATNVLFSGWDGSAATRAATLKSIFKTPLMYKPGTKTVYSDVDYMLLAFAIEAITGKGLDAFLKETFWDPMGLTHTTYNPLLNGFAANDCAATELNGNTRDGAISFTGVRTATIQGQVHDEKCYYAMGGISGHAGLFSNATELAKLASVMLTGGYGENRYFSRNVMDAFTAPKKEDAANWGLGWWREGDNQRCWYFGTQAPSNTIGHQGWTGTLTMIDPVENLVVVYLTNKINSPVTDKAANPNNFNGNWYTASTLGFVAQLLYQGLQNHGTDPNNAYSALLEDMAESKFALVAEGGSVPATHPLVRSGYAVLEAMAAHANSTHSYMDRNYFNDALTLLDDTRDAEELAKLKKMLNKFMCGGFFYAFLRLVVYKTHENLKQNAKQCAKIGEKLRNAKLCATRMEFRDKPMENLMRLQEKDICKNVNALLLEGEQIVGAYKTVRDQVVFTSHRIIMVDMQGVTGTRQQLFVLPYRKVLHYGIQTAGFGDPLQASQLTVCFADGHEAKFGFIGQKDLFQVANAISARILMKLTFLGANHEVTGSCTMLEAAGQRFLIDYGMEQGKNVYENQPLPVAPGEIDFVLITHAHIDHTGLLPLLAHNGFRGRIYATIPTVELCGIMLRDSAHIQEFEAEWKNRKGKRSGAEPVEPMYTVQDAEAACRLFRGVEYGKRIELAPGIEARFVDVGHLLGSASIELWITEGSTTTKLVFSGDIGNLNQPIIKDPTYIQQADYVFMESTYGDRNHDPRPDYVAELAKILQRTFDRGGNVVVPSFAVGRTQEMLYFLREIKEKGLVKGHGNFPVYIDSPLATEATRIFRDTDPDCFDAQTRALLEKGIDPINVPGLRISVTSDDSRMINTDRTPKVILSASGMCEAGRIRHHLKHNLWRPECTILFVGFQAVGTLGRTLIEGVDSVKLFGEPIEVKAEICQLTGMSGHADKDGLLRWVNAFTEKPRRVFVIHGEDEVENRFVDTLTEQGFTACAPYNGAQWAIGAEGAVCLQEGTKVRVEQRTGEGANRAATVFQRLLSAGKRLLRVIEHNEGGANKDLAKFADQINALCDKWDRMVRNDLRNVAIIAHVDHGKTTLVDALLRQSGAFRDNQAVAERVMDSGDIERERGITILAKNCSCTYKGVKINIVDTPGHADFGGEVERVLKMVNGVLLLVDAAEGCMPQTRFVLQKALQQNLSLVVAINKIDRPDARIKEVIDEVLYLLMDLGATDEQLECPILFCCGRDGTASLDPDVPGTDLIPLFDTLLSTIKPPEGDPEAPFQMLVSSVDYNEFVGRIGIGRIQNGVAKVGEEVVVCDWHNPDLKMRGRLTKLYDFQANGRQPCDNITAGDIVAFSGLPDVTIGNTLCSPSNVEPLPFVKINDPTVEMTFSVNDSPLAGREGKFVTSRQIRDRLQKELLKDVALKVEDSATTDSFRVMGRGEMHLSILIETMRREGYELQVSPPHVLTKVIDGKTYEPMEHVVIDVPTQYQGAVMTGLGQRKAILQQMESLGSDRVRLEFRMPSRGLFGYRNQFLTDTHGEGIINQIFDGYDVWAGMIANRSTGSLVSFETGEAVTYGLFNAQQRGTLLVGPGEKVYEGMVIGYTASGEDVDVNVCKTKHLTNTRSSGSDDALRLIPISKLSLEGCLEFLAQDELLEVTPENLRIRKQILNHDQRMKAKSKLKMRYTYVRQHDTTDCAAACLAMVCLHYKKEVTITRLRDMMGTDLKGTNLVGLQKAANELGFTTAAVRVDRENFLSDFSLPCIAQVITDQGLAHFVVVFKKTTIKDDGARRKHMLQDAETRKEEEEKGKKHKCKDYVIIGDPGTELKKISLDEFYKNFTGVLLLLNPTSEFKGGKIEKGGMMKRYINLLLPQKKLFFYAILSSIITTILGIASSMFNKILMDEVLPYGLNSLLVTLILVFSVVSITSTLIGFVRQWVLIHLSIKIDIPLMLGYFGHIFNLPMKFFATRKTGDITTRYSDANTIKSIFTSIALSLVMDISMAVITGIILFRMNAMLFSISLFMALVSILLVLVYKQPYKKINEESMAQSAALNSQMIESLRGIETVKCNANEQTELDNLEREYMKSLKISLRSSRISTTQGLISSFISTGFSMLTTYVGITQVLNGEMTLGGFMAFSTLSGYFTSPLSNLIGLQMQIQEASISMKRLTEIMDYPSEYETAEGVEQSELDKVEGDIEFKDVTFRYGNRAPALDHISFTIPAGKKVALVGGSGSGKSTITKLLLKYYDPEDGEIDINGANLAEYTNSSVRRAIAYVPQNIELFSKTIYDNIRISRMDATLDEVKEAAKKADAHEFIRHLPLQYNTYLEEAGNGLSGGEKQRIALARAFLKDSNLYILDESTSNLDFATETLIFNMIYEQLADRSMLIVAHRLSTIRDCDLILVMDHGKIVERGTHEELLAKDGRYAELWNMQQGIFRKRKSEPAPQVPSAVVEEDDDGESITYMNEIKVAENKTLKLTNVLSRLVRPEELGNLPVILTQMQNFMKSNGAQPIGPLVQAVKMGTGPDHVPELYMMQQATQMITQMEPGYHMDAVLRVKNCLYAHYTGPMSHNQLATAKLQIMAFENDIKLTGDNYTIYVNQDDDDAVIDVFMETKMTTTIQNLSDLQDRRIMMDKKLPPYGYAFVILTGLFMIFLVIWSTQTNRIYVSQNSGVVQAANKTYIMSSYSGSITELYVSEGSYVNEGDLIARLKSTDLDMQKDNLQSQLDIYQKQLDQYNKLLKCIQDDTNYFDETNAEDQPYYYQYQTYKSQVAQKTFDATTYQAAGYSDTQIKALMEQNQSELESLYYSTMQSISQSITSAQVNVDNLQAQLDSLNTGANDYFIYAPTSGVIHMDSPYKEGMVLSAGSALATVASENDDLEIMAMVTVNDRPLLHVGDPCKIAITGLSEYSYGTLTGTVTSIDSDVTSSNNGSYYKMTIKPDATYVVSRSGDKVDLSNGMSVTARVEYDQVTYFEYAMEALGVLFRMIRTAKKLAACVLMLGVLVCGTALSAAAASLPVEEQNGVSLPWLKDVPAESIATGSYSANMLLGASQQLSPVVSPSYSTDSVVFLTDDSSVLTVSSSGVVQAVGVGTATVTAAAGNQICAYTIVVSMDSSMIVTEMDLSLSSNTIYVGNSVSASLQVRPSSASNYATVTLTSSNEKIATVNSFGRVTGVAPGKATITATCGSVVATTTVTVLALPTDSSTGTSGTTSNNSGQVITPNTNYIVLKPGATRTITAKATPASASQSFTFKSGNSSIATVSPTGVVTAVGTGSTSITISNGKATAMVTVIVNRSADAASGSDSSNDGTNTPDDNTTIPLDPVVQTIQDSTEDQVVFAQSEVPIVTGEILNALRTTGKTLCVVGDGYTLNVSGKEVKSTTSEIDTAITFTESEEGLEFELDNGRTLPCAVQLELDVSTYSRLYLYNTISNKWQFLNSYKDGVITADTAGRYLLTNQNLRFGDINWTFFIAGGVVVILIAIAYIVLKKRYWFWMCGIVGYVGMRSAQQVLLDGLEKLEYRGYDSAGVALTQRDGIRVVKSKGRLSTLRSKLEELALPQSSCGIGHTRWATHGEPSDVNSHPHSTPRVSIVHNGIIENYGALKERLIAKGYTFASETDTEVLVKLIDSCYQGEPLQALQAALDKVRGSYALAVLFKDYPDTIFAVKRESPLIVGWGEGENFVASDIPALLKYTRSYSVLEEGDMAVCTAQGIRFYNEFGEAVEREKLTADWDMEAAEKGGYPHFMLKEINEEPAAITATVSPRVENGLPELRIPELTDEKLRSIGTVHLVGCGTAMHAGMVGKTAIEALARVPAEVDIASEFRYRDPILKPEDLVIIISQSGETSDTLAALKLAKSRGVPVLAIVNVVGSSIARAADYVMYTYAGPEIAVASTKAYMVQLCVLYLFALRLAYARGQLTEEKTKYYTAQLLHAPEVIKPRLADCEQIKYLASRYVNTQSCFFIGRGFDYALSLEGSLKLKEISYVHSDAYAAGELKHGTISLITDGVPVIALATQKNVYEKTISNAKETRSRGARVLLFTTKDAEVPEGVATEVIRLDEYDDILMPLQLIVPLQLFAYYMAVLRGCDVDKPRNLAKSVTVEMKKRKSKSWSMAYCGMAAALCVALMLLGTIIPIAMFIAPAVASFLIATVCMECGITMAWTAYAAVSLLGLLFVPDKEIALIFTVLLGYYPLVKPRFDRIRPRALQLVCKLLLCNAAVLAMYGLLLVLVPAGSVSQELRTTALAMSLLTLGMGNVAFALYDRALCNLLLLYKLKWQPKLHKMLGMHMKGRMRPYLPELTIRDYNTYMRYLRGVRRQMYKSYGFYACHLLRTNGVLFAILSDSLAGRMPTCKRQRVPGTPFQRSMMCQTLGIRQAAQTEILMGWHNLQDRKYSELRPAKRVRRAVDKLLLRRAYDKARQENPALERLFAQEREQAVVQMNLSAKNYALAAEPMSNVYGALYSTLATDDPNQRKSMRYIGSCIGRIFYLLDKAERFEADRRNGQYNVFVVNELNGQAAAIENARRQALAAVNDLMRAYKMLDLKLNDTLLNNIMILGLQHAVYPLEQDADTEKWEIPMPAKFELIAPCFFGCESTAKFELTRIGAENIRVEDGRLSFCGGAEMIAAANLNLRTVERVMLLLARYKATTFDELFDGVYSIPWEEFLPTDAAFPVTGSSLNSQLTSIPACQSVIKKAVVKRLMKGHRTTVLPESGVEYKVRFMLRKNVCEIMLDTTGEGLHKRGYRRNAMEAPLRETLAATIADLGRVCRDSLVEDPFCGSGTLLIEAAQKAMNIAPGLKRRFAAERYSFVPAALWAEQRQKALAESKLDVGFEAFGYDIDPAAVAQANVNAKLAGVENRCHFEVADVATFAAKPEAIVLTNPPYGERLGTIEGAAKLARTLGQQMEASPCAGLYAITADMDFELHYGKRANKRRKMYNGMIPCQLYMYYNAPKTEKMAKPMPKSGFDGKRTHFEKKMAIEVGNVFEGRVTGVKPFGAFVALPEGRVGMVHISEVSNEFVQDINTVLHDGDAVKVQVINIAPDGKIALSIKRLLPPVPRQPREGHPAGPRPGGFRGGQEGGRSGGGRGAGRAPREGGRGSAREAAPRVWQPKTPTRSDNLSFEDMMSRFKSQSEEKMADLDHETNNRRGGGYAPRSRRGRMTNMGRKKRRKNAVVTMAFRLFFVLLLLSMLAAYISNQVTISSKRAELETLNEQVAQQQTENQELQRVLSGDADQITEWVARDSYNYAAPNERIFVDVTGNMVQVLLPARLLQEAAACAALGAALGVVRAFLPVRGRTAFVPDMLLSGAVLLACQSYAAGYSAAGVLRWYMVLAAFAAALCVAGVLGVPLRALGRGIRAALRLPGRILHRFAVQPVRRRRAAAKTARKLRRNAERTAKKSKKNLPNRRALLYNSSVSKMEKAAAKPPLPHDLILESRSRLTVTGVQRVLHCSAESAALETGKGILHLSGAQISMQTLDLEAGEAKLTGRFDGLEYTAARTAGSFWHRLLRMRLDKYLKVSRLIKRRTVANEVADAGRILINGKVAKASQAVNAGDIIEVTFGNRPIKVRVLSDVEPRTKDVAREMYEVIAEMTKTDLIAQVAANTEMSKKSAEQAVSAVFEALGKAMTEGEKITISGFGTFEVRERAERQGINPRTREPITIAASRSIVFKPGKSLKDTLMLDWNPQPPYTAEQLLQVIRILRDPENGCPWDKVQTHASIRKNFLEETCEALEAIDADDAVLLREELGDVLMQVVFHAAMEEERGRFTFEDVCRNVCEKLVFRHPNIFASSAEENAGINGWDALKNKEKGRTTLADELATVPATLPALMRAQKLQKRAAGHGLGQQDAAAAQHQLEAAVQAFGKAEDTTKQEAAGQLLFAAVNAARLAGVDAEEALTFASKRFAQQCLEQKQSGTQVEMDFNKIKAIGLEYAEKGKNAAMDLAEKGKTQALLVNEQGKLLKAQRQLGALVYSLAKGKEENQPLVDKYIEMIDTIEQEITRLKATLTPAEAAEVDYEAPMEEAEEAAPEQPAQPARKTCPQCGAPVSDDALFCNKCGAQLMITIWVPKRLVEVDLYNVAARSPQALAQLSENSYARRVQYAAQKVRGSGAKIVMLTGPSASGKTTSAHCLAKALVQQGTPAQVVSLDNFFKGAAYYPKMPDGTLDYENLETLDLPLIKQCLHQLSETGKTELPIYDFATEQRAAAVEPIDLQGGVCIVEGIHALNPELTGLVPDDQIYRIYAGLREEYCIDGRRVINTQDIRLCRRTLRDAAARGRSPAKTLSMWDRVLDGETRYIKGFKTTADFLLDTSFTYELGLISRLLGEVRRQFTLEGHNAELWDETARRFEQVDPLPLELLPADSMLREFYGSRTMKIYITGLPSGYEVEHLARLFYPMAPLTLTQPEPAEDCLWAEKTDTGLRVLVRQGEKSKTLEAPLPLPVEQGGETPEFALASLTYDLLRQWTGIRPPWGKMTGVRPVRLIHDKRAAGWSAEQIDRFFLQRFDCSKQKYEMAKEIADLQEPILRLGSAPKTYSLYIGIPFCPSRCSYCSFVSCNLDRDRKLVQPYVDCLCKEVAEIRAQAERAGLTLCSIYIGGGTPTSLSAAQLRQLMGTVRENFDLSKVVEYTVEAGRPDCTDAEKLAVIKEYGATRISINPQTFSDEVLANIGRKHSAQDILDCYADARRAGHEDINMDLIAGLPGDTVEGFEHSLRQAIALQPENITVHTLTLKRASRIVIEDQKENDYADVAAMLEKCHLLAEAGYRPYYLYRQKNTLQNLENVGWCKPGHEGYYNIYIMEEVQTILSAGAGGSTKLVADGGKRMQRIFNFKYPNEYIQRFAEVLERKKGVAEFYDHNLGTETTGMQGFHIPAAPPLYTNTFLLISDAGHAVVIDPAAEVHSYDEILKQHNATLTTILCTHGHYDHVGSAAALKAEWNATLYCEKADLAGDRMYPLSAADCSYTEGEQIAVDELHFTAWHTPGHTPGSVVLLCGEHLFCGDTLFAGSIGRTDLEGGSSAQMADSLRKLAQLPIPRETQVLPGHGEFSTFGAELDNNYYIRSALRGGNDIFMRAVIQAVSSASVRVEGGEPRAIGPGIMILLGVKDTDTLDIVPKLADKCAGLRIFPDAEGKLNLSARDLGYSALVVSQFTLYGDTKKGYRPSFIKAAKPPLSVDAYELFLAEMAKHGLKDVQHGEFGAHMQVSLVNEGPCTIIIDTDEWKKKEMPEGKKNTAPVPAPVRDEDGYSAKTHLHQPVQETATVAATALLADAPEGALPSEVRPEIVTWEKLCEAIQASGKAYNMEMIQKAYELANNAHNGVCRRSGEPYICHPLAVARLVLDLGMDSESIAAALLHDVVEDTPTTLDDLKAAFGEEVALLVDGVTKLTKIQFSNIEELQAENLRKMLLAMSRDVRVMIIKLCDRLHNMRTGDAWPEQKRRDKARETMEVYAPIANRLGILNVKEELEDRSLHYLDPVGYSEISRMLSERSGEEFLIKVSGVIERRLVESGIEGATIKRRVKSIYGIYRKTIMQNKSFDEIYDIYAVRVILDSLAECYSTLGLIHDMYHPLPNRFKDYISTPKPNGYQSLHTTVIGHEGIPFEVQIRTRKMDEQAEYGVAAHWKYKEGREGHDKLDDRLAWVSQLLENQRLSEDSGNLLHDLKSDLLPEEVFAFTPKGDVINLPTGATCIDFAYAIHSAVGNRMVGCKVNNRMVPIDHVVATGEIIEVLLGPADKGPSRDWLKIVRTSEAKSKIRNWFKKMRREENIQQGRDALSKELRREMILIPDDQLDAFIDGCSRRMRQNNAEELYAAIGYGGMTIANCLPKLKEEWQKLKAAEAEENKSVEDLPKVDLSRVHATDGVVVEGFDNTPIKFAKCCSPLPGDPIVGFITRGFGVSIHKQTCANAVASMKDPSNAPRWVKAYWADSVKDSYKAGLEIIALNRNELLQDVLSALADIRVPIYAMNARQVENNCAVVSLTIGINNTEHLNRVVARLSKVRDVLKVTRSMTYRAWEQKPLDRTAVRELTAAIAEQAAAQLEEQAMDEAPWSDEKYKAVLAAQQKENALLAGILAARGITDPAEALTLLAGEEELSDPALLTDMDAACQRIWQAIDNGETIAVFGDYDVDGVTATALLYQHLKGMGATVKCMLPSREGDGYGLSKNAIQSMHNKGCTLIVTVDNGISAVEEADFAASLGMDLIITDHHLPPETLPKAVAVVDPRREDDHSPFKGLCGAGVAFKLCAALDGCPPEEMLDYCGDLAAVGTVADVMPLVGENRTLVKAGLRQLQQTDRPGFGALLEEVGLAGKPITAENISYAIAPRINAAGRMDNAVTALQLVLCEDPDRAEELAHKLNEINAHRQETEQQIFKAAEELLEQQPERLDDRIMLLWGRDWHPGVIGIVASRLVERTGRPVIVVTIDEHGEGKGSGRSVQGFNLHACIGSCADLLVRYGGHAMAAGLSVREENLPELRRRLNDWAARECPVLHTPPLTCDVTIHLDRITVESVRHLEQLAPYGAENPTPVFLLQSAVVDGVYPVSEGRHSRLRLRQGNSCLYAVWFGMPAEQLPYALGDVVDAALNLSVYESARGAQLSGRIIDLHPAGLGAELARQAALVQALRRGTPLTEEQKKQIAPARTDIIAVYRELQSRRWHAEDLQPLCAKLGEEQTGKTLVAVAALEQVGLITAAEKGGAKFWELVPTAGKKNLADAPILKCLEELMYDRENDNRNNNEGRQVQQELEDQLRAFGDTMTDAFAHGFEGRGMDIGDRAWDVGKAAVHAANYGIGEAAKAFRQGRRGYPYGDAKQPFREGAADADPAGMPGWFRQIFAKPEPTAVESIRISAKKRHSAGYTLLAVGITFAAIFGISGISCLGVAAAATPIWVQDIDIAQYVVGGELLTAAAMTALEFCGGIFTLLACGFGVMISAGASRLSASKKLRLLADAAEKLNAQKGLAVEMLAGLTHQTKKKALKKLRSYIHKGWLNAWLDDETETLYLTAEDYRAAKEAATAAAAQPQPEKVETGDAPLNLDTARRFAAVLEKEQQLMQDAQAREELAAMHKTTTAICDWLEAHPESQPKTRRFAEYYIPTTLKLLHTYNDVQGQQGENAETIRRDIAGILHTLNQAYENLYNNLLSDVAMDISSEIAALQGMLANDGLTGREFEMILVRNIRLPLSAAEPQAFEKALHTLRVPRSKVEHTGVAKLSVDARHGQPKLVYTVAVTLKQPGEEAALAARCPDAALHRRADFTLHAGTQPLAHRPVVCGLGPAGLFAALLLARQGYRPIVLERGPALDARVQAVEHFSATGQLDPNANIQFGEGGAGTFSDGKLTTRIGDELCDFVTEVFLQHGAPAEIAWKQKPHVGTDLLRGVITSIRKEIESLGGEVHFNTALTGLERKNGRLVGITTTNGSFACETLVFAVGHSARDTFSMLMDSGLVLECKPFSVGFRAEHLQSEIEKSLYHEAAGHPALPRGEYQLSQHVGDRCVYTFCMCPGGQVVASASEEERVVTNGMSYHARSGKNANAAVVVSVGGADFANDPRRAIAFQRELEAKAYAAGRAAGAYAAPAENVQSFLEGRGQLHIGSVQPTYDRGVTAADLGALLPGGLADTLRAGLRAYERKIAGYTAPDAILTGLETRTSSPVRLKREEDFVCTQLAGLYPCGEGAGYAGGIMSAAVDGLRVARAIISRYAPAEGMSNQPNKTNGAKPAVRKKKNLLDDRRVRLALSVLGAIVAWMVVTIIVQPGTTNTIYNVPVDYTYDSAAYTSRGLSIVSAEDKTVNLKLSGDGYTIGGLSASDFVVYPDWSSVRDSGEKTLRLLVRGANGLLNGVTVTMEGSDNTVDVVFDVVEEKTLPVTATTNYLRIADGYILYSTEVSKETVTLSGPSSELSKVATCTAEASYSSELTESVTLNTPLRFYTSGGKEVKFQYTTLEESNVDVTLQVYKTATLPVKVNFINAPRGFDNSVLSYALSCKQLKVAGPAEKIDALSTLSIGTIDLSTFSLNKVYEMPIELPTDIYLLDNISTITVSFDCSGLETKTMNLPASCVQVVNLPATYQLTVETERLMNVILCGPKGAMETLTPEQVVIEIDAEDFAVATGQQNIACRLYVPSNGKIFALGSYVLQCRIESNMTLNAIIANFQTFKIVDLLDIIIIAFLIYQLLGIINRTRAGQLAKGALLVMVVYLVANTLNMRTVTWLLNSLLQVGLLTLVVLFQPEIRRALERMGQTDQWASKLFNVKGRYNDPSLKGAWRSAIIAICDAAERFSETKTGALIVLERHTNLSEIVRTGTPVNSAVNLEVLGTIFYEGTPLHDGAAIIENGRIKAAGCVLPLSNNLDLGKDMGTRHRACLGIAENSDAIAIVVSEETGIISMAKNGVLIRHFDRQSLYTRLIDEMIPKESTVEKNTADSWVEQAKKLWNWISQKGEDEQQMEKTVSAVLVAAGSSTRMGFDKLSFDLGGETVLHRSIRAFAQCPQITELVLVAGKNREFVAQQAADCPKPVQIVAGGATRAESAKNGVLAAHGELVAVHDAARPFVSASVITAALEAAARCGAAAPAVPVKDTIKTAARGDGKTVPPDCAVCATPDRSTLYAVQTPQCFDRAAYLAALEELDETRARLVTDDCSLFELTGRPVQLTQGDYANLKITTREDLPCPAQRKETEMRIGHGYDVHRLVEQRKLILGGVEIPFEKGLLGHSDADVLTHAVMDAVLGAAALGDIGQHFPDNDPEYAGADSLKLACRVAQILKEHGWRIENIDATLLCQRPKLAPHIPAMRANLAAAFGLPVEAVSVKATTEEHLGFTGEGLGIAAHAVALIEAVMYLDEYKRWLAADLEDADLKPELAKVEGNDDEIKDRFAVALKFGTAGLRGVLGAGTNRMNIYVVRQATQGLANWVLTQGGTQTVAISYDSRLKSDVFAKTAAGVLAANGIKVRIYDALMPVPALSFATRYYNCNAGIMVTASHNPAKYNGYKAYGPDGCQMTDDAAAIVYDEIQKTDVLTGAKYISFAEGVENGMIRFVGDDCKKALYDAIEARQVRPGLCKTAGLKLVYSPLNGSGLVPVTHVLNDMGITDITIVPEQEYPNGYFTTCSYPNPEIFEALKLGLELATKTGADLMLATDPDADRVGIAMKCPDGSYELVSGNEMGVLLLDYICAGRIEKGTMPKNPVAVKSIVSTPLADAVAKHYGVEMRNVLTGFKWIGDQIANLEAAGEVDRFIFGFEESYGYLAGPYVRDKDAVIGSMLICEMAAYYRSIGSSIKQRLEEIYAQYGRYLNKVDSFEFPGLTGMEEMASIMQKLRDQPPVELAGHKVVKVTDYKKPEETGLPAANVLIYTLENGATVVVRPSGTEPKIKTYFTTLGKDLAEAQAQKDALAAAIEPILKMQQKGERENMTNGECCRYIRTYSELEGLQHACTLVYCAASTPQGVLAQLRREQGGKVRSSTVLAPADSFGRVMRLLRYLCENGVGPEQWLEVLEDVHQPYQLLDTSKNAINIAEEPVFCGICRFMYSVTNSFGLNGLRGFAVAVEADVSGGLPAFSIVGLPDSAVRESADRVRAAIKNLGFRFPDRRITINLAPADVRKTGPVYDLPLLLALLTASGQLEEVPADAAFLGELALDGSLRPVSGVLPMALAAAEHGIRALYVPTENAAEAAEACADTMTVYPAHTAREVVEALKGIRPLSPAAAIPFDPEDAWQQVPDFADVMGQSLARRAMVIAAAGGHNVLLTGAPGTGKSMLAKRLPGILPPLTREEAVETTKIYSIAGQLPQGRGLISARPFRSPHHSASAAALAGGGAQFRPGECSLANCGVLFLDELPEFSRESLEVLRQPLEDGQITVSRAAGSATYPSHFQLVAAMNPCKCGYYGHPTRACTCSPSAVRQYRSRVSGPLLDRIDLCVEMDPIAFDELHTAAPSESSAELRKQVLAARAIQAKRYAAPGFKGVHCNAQLNAGQVRRICRMTPGAEQLLRSSYDALGLSARAHDRILRVARTVADLAGKTLLDEDSLLEALQYRAQEKLDGMKRAYTNGILLDGTEQMEPVRGKVLLTENDKITAIADASVSLDGYEVIDLHGGYLCPGLINLHVHLAGNGKPSAKPRDNAALVRKILSNRLTRAIAYRLVCSYAKLELLGGVTTVRTVGGIADFDTRCRDDSAAGKVLAPRILAANEGISVPGGHMAGSVAVAAHNNAEALAQLKKASAQKVDLVKLMITGGVLDATEKGTPGEMKMPPEMIKAVCDAAHKLGYTVAAHTESPAGVKAALENGVDSIEHGAKMDEETVRLYKERGAFLCTTISPALPYALFDTAVSGASEKDQYNGKIVFDGVIESAKTALANGIPVGLGNDVGCPYITQYDFWRELCYFHKYCCVSNRFALYTATLRNAQLAGIGDVTGSIAPGKSADFIVTRENPLEDLRALQHLELVVCRGRAVKKPSPKRKKEVDALLDPYLVMNIRKAEEKDIPRLLALLGQVLQIHAEIRPDIFIPGTTKYTVCELAELLKQEDKPIYVAVNEEDVCMGYAFCQLKKQPFSTNMVPFKSLFIDDLCVDKQARGQHIGESLFEYVKQQAKALGCYEVTLNVWAGNTSAEHFYEKMGMKTKERQMEYILMRARKIVLMFAVIAVLLIIILGRPITTDAPQIMGSKEIEDALNAASELDEQNVVRVDIPDGNGGYKTLQGEEAREHYSKAVEQTQKELLDDLYKENSKESIKMKKLVVDVGSMLVVQYLIFFFVEIRLGEQATFTKFITNNYILTFWIIYLASRIVNYKIKKPRNKKMPIKNAIHSQQVYDPTDESIMAEQELCMERLYAYNHTRPSEHAKREQLLKEMLAECGAGCWIEPPFHANWGGKHKHLGDFLLRMYFNSGYLNNSRLDFKDYSKPLVVGSCGTYRLKKRPKLPTFWAKGRRDYQILYVASGKAHFWFDGVEEVVTSGHMVLYQPTEIQKYVYYVEDHPEVFWIHFTGYDVKNILNYHGIPLDKHVFYSGTLPDYKMLFRKIIRELQQCEYGYEDYIASLFNIILLLVSRQQQESEKTTTSIPEEIEAAAAYFNENYNTKVSVDDYAESLHISTNWFIRNFKLYMKISPAQYILSLRMVNAQSLLENTEYNIGEIAEIVGYDNPLYFSRVFKKEYGVSPAQYRKNLEESTEKMTEKRYLKWYNKVGYGSGDIAGNVVYAFLSSFVMIYLTNTVGLNPGIVGTLIAVSKLLDGVTDIFFGSLIDKTHSKMGKARPWMLYGYIGCAITLVAIFAIPTNLGQFAQYAWFLIAYTLLNAVFYTANNIAYSALTALITKNSAEQVEMGSWRFMFAFATSLLIQSITLGAVTALGGGAAGWRTVAIIYAIIGLLVNTLSVFSVKELPEGELVDTTDKKEIEQDEKYNLVQAAKLLAGNKYYMMICVTYILQQIYGAMISMGTYYATYILGNQNLFGVFSWAINIPLIIALVFTPTLVAKWNGMYKLNVMSYTLATISRALVAVAGYMGSGNVTLMLLFTAIAALGQGPWQGDMNAAIAACSEYTWLTKHKRVDGTMYSCTSLGVKLGGGLGTAITGWLLAASHFDSALAVQPESCISMLKIMYLVIPFALDAIITFILSRMKVEEANEKLRAAVMAAFDFAKVKDPTFFKENVLNAHASFRTYASREEYRTGSSSLALKLDGIWKFAYAKNYTSAIPGFEKTDYDCSGWDDIHVPAHIQMEGYDIPQYANVQYPWDGREEVQPGEIPQRFNPVASYVKYFELPESMQGKPVHIEFEGVESGMALWLNGSYVGYTEDSFSAHAFDLTPYLQPGVNKLAVQVFKWTSSSWCEDQDFFRFSGIFRSVWLYAIPTVHLEDISVKTLFAGDDFTHSTLEVALQAEGKGAARLTLRRSEQEVFSEKIALNGGSALFSHAVENPHLWSAEDPALYELEIELLDDAGHLVEVTGQKVGFRKFELKNNRMLLNGKRIVFKGANRHDFSSITGRAVGVHTHEELLRDIITMKQNNINAIRTSHYQNQDALYDLCDEYGLYLIAENNLESHGTWDIHQAGIRGIEGVLPNDKPEWKAVLFDRMNSTYQRDKNHPAVLIWSLGNESFGGETLLQMAEMVRRFDDTRLVHYEGVVNDPRFLETTDIESHMYSTVKDIKEYLAQGDQRPYIECEYSHAMGNSNGALHKYTELADQKDCGYQGGFIWDYIDQSIWKKDRYGKWFQAYGGDFGERPTDYNFSGNGIAYGGDRAPSPKMQEVKFCYQNIAVSIDNSGFEVWNKNLFTSTGAFDCVALLHRDGKLYQQQELTNIDVAPEERSSFPLPFMVPALPGEYAVTISFRLKEDTSWAKKGHEVAFGQGVVAVVRSIPSKKVTPFTVTHGTHNIGVRGENFDVLFSDLKGGLTSYRYAGKEMIQEIPRPNFWRAPTDNDCGNNMGGVRGQWKLASLYATAKGIGKEIPSVHGGTILQNPTCEVEADSVVVTYLYNLQTSPAAECSLQYRVFGDGRIQTTLHYDPVEGLAAMPEFGVLFKIDADYDTVEWYGNGPAETYWDRQHGAKLGIYQNKVADNMAQYLVPQECGAKTAVRWAKVVDRKGRGLLFTADAAKPMFFSALPYTPHEMESAKHPYELPPVHYTVIRAIGEQMGVGGDDSWGANVHPEYIPDVTKPVEFTFTFRGIMFAVSADNATCVNRTLQWRWLETQKFSNASVIDLQKKETARASMRKMVKHLLKKFKYPPVEYDKICILQYVKESLENHSKKCSKQKLNTVILTMDELRKTGRVTIPTDLDVVPETLEILKKWGADAIRDCDGTDFPQQLKDADAKIYSTYYTTRKDNAWAKANPDEVQQCYIMTGFYTAPGDTVTIPLMKGISPELMQVNTNDDITRWWEVMDRTTGQPVPPEQWSYADGSVTVQAVPFHEYTVSFLAYLIWDPVHMYNATTNGWTNFEHQITFDVRQPKTHKYSMERLRKFIAEHPYVNVIRYTTFFHQFTLIFDELKREKFVDWYGYSASVSPYILNQFEQEVGYKFRPEYIIDQGYYNNQYRVPSKEFRDFQAFQRREVAKLAKEMVDITHACGCEAMMFLGDHWIGTEPFMPEFKTIGLDAVVGSVGNGSTLRLISDIEGVKYTEGRFLPYFFPDTFHEGGDPVREAKENWVTARRAILRKPIDRIGYGGYLKLALQFPEFVDYVESVCNEFRELYENIKGTTPYCVKRVAVLNCWGKMRAWGCHMVHHALYYKQNYSYAGVIEMLSGAPFDVKFISFEDIKNDPHLLDSLDVIINVGDADTAHTGGIWWEDPEISSAIRKFVWNGGGFIGVGEPSGHPYQGHILQLASVLGVEEENGFTLNYDKYNWEEHPDHFILQDADQPVDFGEGKKNIYALEGTEVLVQRNKEVQMAAHDFGKGRAVYISGVPYSFANSRTLYRAILWSAHSEEELHTWFSSNYNVEVHAYVKNGKYCVVNNTYEPQDTTVYTTGGSSFALHLDANEIKWYEIMKAYWKNHPALRMILMLVLFVLALVLVVSGWKMTGQLAGLGIMLVGVALLLAVLALYNAAYDMQNTTEKSSRSAEGLYKFFIYFVLVLLAVTIIVPVAWVFMASIKQNAEFYGNPWALPAGFYWQNFVNAWNGAKMGEYMLNSVIVTALALALLLVVALPAAYCLSRFHFKGCKVLNTLFMAGLFINVNYIVVPIFLMLRDSDVWLKGHFGSGFLLNNLVVLAVVYAATALPFTIYLLSGYFATLPHDFEEAAYIDGASYFSTMTRIIFPMAKPSIITIILFNFLSFWNEYIISMTLMSSTKAPRTLPVGLLNLMQAQQSAAQYGTMYAGLVLVMLPTLILYICVQRQLTQGMTVGGLKGMKSDKSRKRFVFLCVAPATILFFIFMILPTLNVFRMSLYERGAYSPNETFVGLKNFQHLLRDAQFIRSMQNMILLVVTVTLITFAFALVFAAILTREKIKGQNFFRIIFYIPNILSVVVISGIFSAIYKPENGMLNSIIGLFRDMTDPILWKGEKLVIPSIIIAMVWQAVGYYMVMYMASMSAVPISLYESANLDGAGRLTQFFQITIPLIWTNIRTTLTFFIISTINMAFLFVKAMTSGGPNGASDVALSYMYSQKDAGLYGYSMAIGVVIFLFSFALSACVNKATSRDPLEFMNRISRRNFLKAAGVGAAALGLAACGGSSSSTASSVASSTAASSAAAAADVTIKVAAIETGYGADMWKKVAEAFTAQTGIKVDLTTDKKLEDVIGPSMQGGDYPDVVHLATGREAALTEQFIKGNLIADITDVLSMTVPGESKKVSEKIAGGFTDTSLTNPYGDGKTYLAPMFYSPCGLFYNAGFLKEKGWDVPKTWDEMWALGDKAAAEGTYLFTYPTTGYFDAFFYALMYAAGGPEFFNKATHYEEGIWDTPEAKTCFDIVTKLASYTNPITPAQANDQDFTQNQQLVLDNKALFMPNGTWIVGEMAEAPRADGFEWGMTALPAVKAGGDSYSYTWFEQAWIPAGAEHLDAAKQFVAYLYSDEACKLFAESGAIQPVLGIADDLDGDNKMFYSIYDNGAKAAMGNFAAFSAIPGVEVRTVFFDPVNSLVSGSMTEQQWIDGIKSASDQMRANIIEMSTERFDIRHAPAPRESFRLLYISKSKFGGDWNSTTHTHSCTELFYCLSGEGQFYLAGQLFPVKPDDMVIVNPQVEHTELSLNASPLEYIVLGVASMEFLFSKADTNYAIFNCRENRERMVTLLHMLLAEADRSLDGCETVCQDLLEVLLIWLVRCTTISLQLEEAAPTENRECAEIKRYLDTNYREDISLDLLAELAHLNKYYLAHTFQREYGISPITYLNRRRIEESKHMLGNTGYSLAQISELMGFSSPSYFSQCFRKAEGMTPNEYRRQTRQGKRPAPTKRHEVMKSVTLSLLQSAANAFDFGGPVLCDAHHYGEGHINDTFVVWREDHSKRFILQRINTDTFTNPVGLMENVCGVTRHLRAKILAEGGDPARETLNVVPTLSGSTCYLDADGGAWRAYDFVEDTICLQQVGSETDFRTVAETLGKFQNQLEDYPASTLHETIARFHDTPNRYANFEKALAADALGRAKNITSEIEFIHAREQDCHVLLDQLAAGEIPLRVTHNDTKINNVLIDAATGKGICVIDLDTVMPGLSAYDFGDSIRTGANDCAEDEPDQSKVHFDLHLYEVFAKGYLSTAGASMSMAEKKSLAWGARLMTLECGIRFLTDYLEGDHYFHIARPDHNLDRARTQFTLVRQMEEVFDQMLEIVCPDNHMNKPSILVVEDDVPVRCLITTTLKTHGYKYLTASNGETAIMMTTSHNPDIMLLDLGLPDIDGIEVIRSVRTWSNLPIIVLSARSEDSDKIEALDNGADDYLTKPFSVDELLARLRVTQRRLNLLASDGINSPVFVNGPLKIDFSAGCVWLSENELHLTPIEYKLLCVLAHNVGKVLTHTSLTQKVWGSTQENDIASLRVYMASLRKKLERYPDAPHLIQTHVGVGYRMLRAENDEAMNQNDQPTEHILACLSSSPSNAKIVRTAATMAKAFGGTFTALYVRTPDSDQMGKEDCRRLQQHIRMAEQAGADISTIYGDDIPQQIAEFARISGITKIVLGRSSVHRRHFWSGPSLTEKLTLTAPNLDIYIIPDASAENGYGSGKKLFTRPLLPSVRDLLITAGILSCITLIGFFFLQLDFARYNIIMLYMLGVLFTAWFTSGYTCGVLGSVASVALYNFFMTEPYLTFHAYDPGYQVTFALMLTSAIITCTLTTRLKDHAKMSAQAAFRTKILFDTNQLLQRAKSEEEILSQTASQLMKLLNRSLIVYPEQNGDLGSEQVFEIDGEVPCNIFSAPEERDAANWTFANKKRSGAGTDSYPDAKGLYLALRTGGGVFGVIGIDLSEKPLDAFENSVLLSILGEGALAIENRRNALEKEQAALQARNEELRANLLRTISHDLRTPLTSISGNASNLLSNGETLDTETRNKICTDIFDDAQWLIGLVENLLSITRIEDGRMNLQISPQLMDEMIEEALHHVNRKSCEHTITTQYGDEILLVNVDARLIMQVVVNLVDNAIKYTPVGSVIQISAYRKDHQVVVDVADNGPGIPDRAKAQVFEMFYTGQSRIADSHRSLGLGLPLCRAILTAHGGTLTLRDNIPNGSVFSFALPQSEVNIHEMKSILLIGLGRFGRHIAQELNELGHQVMAIDSNEDRVNAVLSYVTNAQIGDSTSEYFLRSLGVGNFDVCIVTIGGNFQSSLETTSLLKELGAKLVVSRAERDVQAKFLLRNGADEVVYPEKQLAKWAAIRYSSEHILDYIELQDDHAIMEVTIPPEWMNRTIGEINIRKKYNINILALKKDGKLDMSITPDTQLCRDESMLVLGKYASIQKCFRLMIQYPRYRQHRFSSFQVIIAGFAAVDLVGALLLMLPIAAQQRCVTPFHEALFTSTSALCVTGLVVQDTGSYWSAFGQSVILLLIQIGGLGVITVGAAFALLSGRKISLKQRSTMQEATAAPQMGGIVRLTGFILRITALFELAGAALLLPTFCADYGLRGIWYALFHSISAFCNAGFDLLGTEGAKFVSLTRYAGDPLLTTVIAALIVFGGLGFLTWEDICTYRLDFHRYRMQSKVILVTTAFLLVLPTLYFYCFEFTAGSARQRILLSMFQSVTPRTAGFNTADLAAMGSTSQALMVVLMLLGGSPGSTAGGMKTTTFAVLLANMWATFRRREDAEFFGRRIDSSAVKNAATIAGMYLTLFFLGAFVIAAAEQLPMSVCLYETASAVATVGLTLGITPQLGILSQGVLIALMFLGRVGGLTLIYAAFGSSPAHSRLPQEKIAIGMTLDYFYGQAGELFSFFRIPKALFQEQRFQNLSTDAKTLYGILLDRMSLSAKNGWLDKQGRVFIIFTIEDVKRTLCCADNKAMKLFRELEKFGLVERKRRGLGKPSLVYVKNFSSDLSNERVQNRENHESGAFKKECQDPPKSRCNKNKKNKTERNNTNPILSDEMDEMNNRELLEEYFSHSLEIDLLLRLYPDDEDTIYQIVNSLVDTCDSKRKFIRIAGDDKPAEVVRSRLKKLNADHIRFVLDCLSANTSPIRNMKQYLLAALFNAPTTMQLYYQNKVNHDLAARRMKISKKATTIAVINQKGGTGKTTTCENLGVGLAMEGKKVLLVDADPQGSLTVSMGWQDPDALPTTLSTLMQKAMNDQCIPPGEGILHHAEGVDLIPANIELAGLEVALVNTMSREKVMKQVLESTKRQYDYILIDCTPSLGMLTVNALAAADSALIPVQAQYLSAKGLEQLLQTVQKVRRQINPKLKIEGILLTMTDSRTIYGQQISNLIRQAYGKHLKVFEQTIPRSVRAAETSTTGKSIFQYDPKGKVAEAYHSIAKGVLADAEKRIKRQSEQLRMPKNGLNVSLNSYDDIFSTEEARQEEQREQVQQISIEELHPFKDHPFKVLDDEAMQHTVESIKLLGVTNPLIARPRPEGGYEIISGHRRQHAAQLAGLKALPVIVRQMDDDAAVLLMVDSNLQREQILPSERAFAYKMKLDALKRQGARSDLTSTQVAQKLSVEKVGEDAGVSKDTIRRFIRLTNLIPELLDMVDEKKISFNPAVELSYLDENQQRDFLEAMSDTQNSPSLSQAQRLKKLAQEGHFSYDVAFAVMGEPKKDELDKVVIKNDTLRKYFPESSTPREMEEKIIGLLEESKAEKIVFRSDALKKYFPSSYSSKQIEDSIIKLLDQRLKKRKHEAERMNNTASRIIRSEEITIDMRICTILAGGKKPGEVYFAAIATDMELTVITLDEAPDILPCFDESDASIHLPDTSLLLTYNPAQVLKMAGKRYLTGPVILVRANMDGNFISLTIDDVYRFQKFLSSHSVTLMADDQKLPCICIDMAENTLSVLEIAPGQYPKQIVIDNDLKALQQAVDGPIAASYPFEDPVAIVYNDEGKLTGLPLNRALRDEHGQMYDAVAGTFLVVGLGEEDFASLTPELAQKYEKHFHQPEAFIKLGKRLLVVPVPDEAVQSAEPKAHIKPSAEHDRMQEEVEQKTFNIVVSTTKLTARTILNAGRTALREYQSKLLADKSSGKQSVRMLLRQNRGVSSVEIDKTNIKGFERYAKKYGIDYAIRKDSSEVPPRYLVFFKAPDAEAFNAAFKEYSASLLSKTKRPSVLEKLHELVQAAAEIPGKVRHKQEERGLMTTKKLTKLLALYLPYILLGLVATNFGEAWRLAEGKELGDKIMAMMGTFPVAFANPLPSLHPFDLVIGLCCGAGMRLAVYLKSKNAKKYRHGMEYGSARWGNAKDIEPFMAPKFSDNIILTKTERLMMSNRPPDPKNARNKNVLVVGGSGSGKTRFWLKPNLLQCHSSYVVTDPKGTIVLECGQAMLKNGYKVKVLNTINFKKSMHYNPFSYVHSEKDILKLVTTLMTNTKGEGSGGDPFWEKSERLLLTALIAYLHYEAPVEEQNFATLLEMLNTMQVLEDDEEYQNPVDLLFEDLAKTKPNSFAGRQYKLYKLAAGKTAKSILISCGARLAPFDIQELRDLTMYDELQLDTLGDKKTALFLIMSDTDSTFNFLISMVYTQLFNLLCDKADDVYGGKLPIHVRCLIDECANIGQIPNLEKLVATIRSREISACLVLQAKSQLKAIYKDNADTIIGNMDSQIFLGGSEPGTLKDLSEMLGKETIDSFNTSDTRGNSPSYGTSFQKLGHELLSRDEIAVLDGGKCILQLRGVRPFLSDKYDLTKHPNYKLTSDYDPKNTFDIEKYLNRKEKIYPGDEFIVVDADSLPSAMEFFNSAIEVLQTLVVALGAGLGVWGAINLLEGYGNDNPGSKSQGMKQLMAGGGVALVGITLIPLLSGLFGMETVLKAIADWIKGILTAGIMSNLSGLFDAVNEQVGDIAQQVGTRPSAFEPRVFAMIESLSRNVVLPIAGIILTFIACYELIEMITQHNNMAQFEPALIMRWIFKTAVSVWFISNTFDIVMAVFDLTQKVVADSSGIIAGNTRVNEIGLSMLEASLMQMDVGPLFGLFLQSFFIGITMRILSIVIFVIVYGRMIEIYCMVSLAPIPMATWGNHEQSHMGQNYLKCLFALGFQGFLILICVAIYAVLIQNVAISGDAIGSIWSIVGYTVLLCFSLFKTSSVTKSVLGAHMAAYISVPRDLTKVKSKVAFNLTKRQLICFGTAALIGVPLFFVLRDSGGNTAATLGMMAVMLPAFFLGMYEKNGQPLEKLLSHYVQARFLRPKIRPYKTNNYYAILMRGGSAHAVLEKDRMPFWKKTDKGGKKKPPKPAVPRTAQQSIPMQRMFEDGTCRVKPNYYTRTIQYQDINYQLAQQEDKTAIFEEWCSFLNFFDSSIKFELSFVNMATDSTEFEKSIRIPYQKDGFDDVRAEYSQMLRQQLAKGNNGLTKTKFITFGVEGESMRQVKARLDHIQNDLLNNFHRLGVPAKPLNGAERLKLMHDMFNMDGASKFHFDWKDLVKSGLSVKDAIAPTAFAFKNSRTFQMGGIYCAASFLSITASDISDQLLKDFLDMDSSQIVTMHIRSVDQNRAIKTVKRTITELDRSKIEEQKKAIRAGYDIDIIPSDLATYGRDAKALLKELQSQNERMFLVTFLVLNTGRTEQELENNVFQASSIAQKHNCNLCRLDYQQEQGLMSSLPLADNQIEIQRGLTTSSTAIFIPFTTQELYQSGKESLYYGLNALSNNLIMVDRKKLKNPNGLILGTPGSGKSFSAKREIANAFLVTDDDIIVNDPEGEYSPLVNRLKGQVIKISPNSTQFINPMDINANYSEEDNPLSLKADFILSLCELVVGGKEGLLPVEKTVIDRCVHLIYRKYFADPRPETMPILEDLYNALLQQDEKEAHHVATALEIYVKGSLNLFNHRTNVNVNNRIVCYDIKELGKQMKKLGMLIVQDQVWGRVTANRSSGKSTRYYMDEMHLLLKEEQTAAYSVEIWKRFRKWGGIPTGLTQNVKDLLSSREVENIFENSDMIIMLNQAAGDRQILAKQLNISPHQLSYVTHSGEGEGLLFFGNVILPFVDRFPTDLELYRIMTTKLGEVSEGAQKMNDSKLNFKEETSAKKTRSPPKKARVEQSTSKKKKLKLDAEKAAEKAQHLRFGKAELTPDELSRLSKAQKREMFAAHAARSAAHREIDQYEEDNVGVQALSEGEKTAGNIRDISKSRYARKLKKKAKMQDKKGTKTTKSSAQEPTVAQNAGGSSIGTSEGSSNWLSRWKQRKEIHKSYYAAARSGGTATQTAGGKKAASGGASVARSGVEQVVDKGKNVVSTTVNGLMTAAKSNAHVLVIVGVFVLLILMVMSGFSSCGILFSGGTQVSGQTIYTAEDRDIRGAEQDYKKLEKELDKKIKRTPQDHPGYNEYQYHLDPIEHDPWQLTSFLTTLYDDYTRSEVQGKLQEIFKKQYKLTTWVEVQIRYKTVWVISPAGIPVPTQVPYEYKIFHTKLENKGLEVVIREELTDDQWKRYEIFQDTLGGRPYLFNGGLPPGGSDGSGTPGIDYTVPAEALTDSEFAAIYEEAKKYVGTPYVWGGSTPETGFDCSGYVCWVYNQNGYDVGRTTANGLWQKSQHISEAEAKPGDLVFFKGTYDTPGMSHTGIYLGNGMMVSAGDPIKYANIHSSYWEKHLAGFGRLSKMSEKLEKLRAMLEKEKERRIKLNNRIEILERRIQEAEAAEVNEMVRSAKVSPEQLAALLRQSANATPNPATLAAVGAVFAKEDDSDEDMKIKRFGALLVSAVLCIGMAAPAFAFEGDFTPVEQPVLPEIVEEEDTVTITDEASGALTPEGNLTLVDDYYTNYSDGSGQQFITMVSKSGATFYLVIDRNAKGQQTVHFMNLVDEADLLALMEEDAADAYTAEKEAEKQAELDKLKAEEEAKKAAEEAEKAADAPKENKVTKYAAAFLGVVAIIALAAGGGFYFFIQQKNKKQAEKEAIDPDADYTEDKGDFEIPPEDDSDEDTSEEQDVTPIMFIAKLIVTEKPSVAMSYAKILGVHGRQDGYLEGNGYLVSWCVGHLVELAPPSAYGEQYVKWNIADLPILPEKWQYLVSASTKKQFGILKKLMHRSDVESIVCATDAGREGELIFRLVYEQAGCKKPFSRLWLSSMEDSAVREGFANLKSSTEYDALYQAALCRERADWMVGINCSRLFSCLYGRPLAVGRVMTPTLAMTVEREAAIAAFMPEKFYTVALELTSGFVASSRRISEKTAAENLLAECRKEMVSTIQKITRKEKAENPPLLYDLTTLQRDANRLLGYSAQQTLNYLQSLYEKKLTTYPRTDSCYITDDDEDMLEELAEELEDFLGFVSEDADDDVPRTRRTVNRQKVTDHHAILPTRSMLQADLDALPKGERNILKLIIARTLMAVSKPFRYLETLLTTECAGEEFTANGKEILDEGWKAVERKVLADILSRKKEFTALPPVEESECGILNAELKEGQTSPPKHFTEDTLLHSMETASAESMPEDAERQGIGTPATRAATIEKLVQKGFLERKGDKKTKVLLPTDKGKALITVMPEEIQSADMTADWETKLLRVERGEMEPETFMTEINDMISSLVNTTEAVKGASALMKNKVIGVCPNCGKSVVEREKGWFCENRECRFVLWKDNAFFKRLGKRMDAHVADKLLRDGRVRLKDCKSSKGKTYNATVLLSTEADGRSKFSLEFEGGRMEQNKEAVYLINNERYLHLRENGAGVGFATYNKVTGEPLESGQISEKNLPPDGRNAIAAARNWYLFELSDDDRKAIQLESVKILETIPQAGIGRRRIWEPETILPDIRLINSYYDDLHRVPDGGVIQVDYPDGRSFTAQLEYLDDYHFDMGGLGNVFHICQFAEVMERNGADYYPEIQTQDEQGAWELGGKGYLAIQSTDEGWDYTIYHSDYSVLDGGQINAPELTIQEVREQILEAHHMEKGRRLLQDYDFVMDRAAEAEELGLNQRHSTLEKLAALAGAKEKCDAPECSPAGCRKVRDAHELMPMNFNGEELMLMILYNPGTRLGLMQELRLMQCYLMPDETALRELSEQVIEKLKLLTNAEFAELEFPLDMGEFDFTYVLPKNFSRRVVQYLEQLESPNVAKAFQNCTYDYEDLGLAYYVGMKGDNWDKKALDFTVEGSPRDIALLKSKEHTLKESISKSLKSSESGFLLKEIYYFESESVEHIPLSNAARLNADIESSQAVLQDLIQMGQRFCSNCAFNSSSSENSMNDYFRDLLFIKGYTEVKDQTRHGLSVNKKDSAEVDILLTKDGKEIAIYEGLKLSSVSTTYIDIHINKAIVNYNALGTATFIVAYVDVADFDSFWNKYFSYLQSYSFPILVKSPIEASPYPNAATRVASTILSRDDYDFPVYFIAFKIPRMPNKTQEYLNLAQQTAKELTRYWENWTDYLTTASRLYKYSFADQLMIYAQRPDATACASFDIWNNRMNRYVRRGSKGIALLDQSSSVPRLHYVFDVSDTGVRCNSRDPEVWQLGPDLVQPVSEMLAREYGVRHERITQQIADICGKLVDCYWDNNSGDILDIVDGSFLMDYDEAGQEFQFKSAAAISITYAVLERCGFEPEGHFDWDDFQAIFSFSTPAAVYALGTAVSECSRELLRSIERTVKTTIRRRNVERSQYEYEQQERDLLESRRLSASEPDPAPAGESIGQVRATAPDLPDEASPGTVQLDASVGNSASAPVGSGAERGEPDTADHAEAAGAESGSEQRAASDGVGAAHEQPERTGRGTGDERADLQLSFFDTHIPTEAKQIESIDQAESEKSPSAFSLSQADIENALRRGSNFENSKLRIWKIYQLQPDRNLRAKALAKEYAPNGPGGSSHTYLDGSRGWLDHDSKGLTFEHYPDHQKTLLRWNQVEKYIDLMIQSDRYLSDKEKRIIDFPLELNDTSAAEYTALKEQYPDTLIGFEAGGNFMFYGEDAAKVAKIINSALFMRNTALGEVQITGFLPSLWAKRAKELWSAGNDVYLAGLNEDGTHHQTKHLRKEDYLPIGSVINMDDRKFRVDSVDFDKDKVSLQDMALADARMPIFREEPLTVVRELYEQQDEALDTAPEKTPDYNVGDSVVVDLPTRTIEGTIGYVGETDVRIDTSAQGYSWSNEVLNKQQFEDGLRQDEPELSDEELDKLPTSVEVNGEWQTFPDAAAADKALNAEPVPEAAGNFHITDDHLGEGGAKQKYARNVEAIRTLFQLEQEHRGATAEEQQVLSQYVGWGGLPDVFDPDKGNWAKEYSELKGLLSEDEYAAARSSVLNAHYTSPTVIRAIYDAVEKMGFRNGNILEPSMGIGNFFGMLPDTMQDSRLYGVELDSVTGRIAQKLYPDANIKVAGFETTDRRDFYDLAVGNVPFGQYRVNDKAYNKLGFSIHNYFFAKAIDQVRPGGIVAFVTSRYTLDSKDSSARKHIAERADLLGAIRLPNTAFKANAGTEVVSDIIFLQKRDRPIDHEPDWVQLSKTEDGFAINSYFVDRPEMVLGELTTESTQYGHDLTVAPIEGAVLADQLAEAVQHLEGQYTEVEVETPDIADAENERHILPADPDVKNFSYTVVDGEVYYRENSVMTQVELSDTAKGRVTGMVELRQIVNELIDQQLNDFSDADIKATQEKLNAAYDSFAAKYGLLNDRKNGRLFEQDSSYYLLCSLENLDEQGQLKSKAAMFTKRTIRPERTITSVDTPTEALAVSIGERGRVDLPYMAELLGTPGEYGRITSELSGVIFKDPGADPTDPEAGWQMADEYLSGNVRAKLRMAQLAAETNPEFAVNVTALEKAQPKDLEASEIDVRLGATWLPPEIIQKFMAETFQIPYYLRHAVKVRYSPYTAEWRVEGKSAMGRGDIISSETYGTSRANAYKILEDTLNLKDVRIYDTIEDEEGRPKRILNKKDTMLAQQKQQVIKDAFANWIWQDPQRRISLVRQYNELFNSGRPREYDGSHIHFVGMNPEITLREHQRNAIAHVLYGGNTLLAHEVGAGKTFEMAASAMEAKRLGLCQKSLFVVPNHLTEQWASEFLHLYPNAKLLVARKKDFETANRKKFCARIATGDYDAVIIGHSQFERIPLSYERQERIIQEQIDETLAAIEELKANAGENFSIKQMEKTRKTLETKLEKLRSDERKDDVITFEQLGVDRLFVDESHFYKNLFLTTKMRNVAGLSTSEAQKSSDMFGKCRYLDEITGGRGVVFATGTPVSNSMTELYTVMRYLQYSTLQQKKLTHFDCWASTFGETTTAIELAPEGTGYRARTRFAKFFNLPELMSMFKEVADIKTSDQLHLPVPDAKFETVVAKPSEMQKEMVQELSKRAAKIHSGAVDASEDNMLCVTNDGRKIGLDVRLMNPMLPDDPNSKLNTCVRNVLQIWEDGKEQKLTQLLFCDLSTPKNDGNFNVYDDIRKKLVAAGVPENEVEFIHNADTEAKKAALFSKVRSGDVRILLGSTAKMGAGTNVQQRLAAVHHLDVGWKPSDMTQRNGRIIRQGNQNKQVQIYNYVTEGTFDSYLFQTLENKQRFISQIMTSKSPVRSCDDVDEQALSYAEIKALCAGNPLIKEKMDLDVQVAKLKVLKADHQSQKFRLEDKLLTKFPADIQETTAYITGLKSDAELAAVHPQEKEGFCGITIKGMAYDEKKTAGERLLLACSELPNSEEKVIGSYRGFELSLRLDTYHSEYQALLKGQRKYSVALGKDPLGCIIRLDNSLNNFPERITSAENELATLKQQQAAAQIEVEKPFPQEEELAEKSARLAELNAQLDADEKHEPEQGEEEKADEPRRPSVLAALEEKSDKAEPVKLFKSYLDKDGDARMNDRRDQQLHFRVSKQELERIWSKMESSGILSIGSYLRKMALDGYCLHLDLPELRRMAHLLQMCSNNLNQYAKAANESGQVYAADLEDLRIRLDELIAISKQILSWLAGFMIALHKNKGKSVVACLKSRTDYAQNPEKTEQGELVSSYECSPLTVDEEFMLSKRQYELATGRRQRSDVIAYQIRQSFKPGEITAEEANKVGYELAMRFTKGKYAFIVATHTDREHIHNHIIYNSTALDSTRKFRDFLLSGLAVQRLSDLICLEHQLSVIEKKPYRERQKRTLYPPKESNRDHLCSVLDNILAEKPKGYEDFLQKLEQQGYEVKRGKYTSVKGKRQKRFIRFRTLGTGYSEEELKAVIAGEAEHRPHQKQPPKEKPFNLLVDVQAKLAEGKNIGYARWAKKYNLKEMSKTLIFLQEKKIGSIEEMQERVDAATARYHELGDSIKAAETRMTEIAVLRTHIVNYAKTRPVYDAYRKAGYSKRFLENHRAEITLHKAAKTAFDEAKLKKLPKVKELDAEYSKLLTEKKAAYPDYRKAKDEMQELLRAQRNVELFFAEEKNTTEKTQSRMKDIEIGPIRPPSESNSLLIRVTRGCHWNKCYFCGLYKSMRFSMRPIDETIEDIKRQAQLNRGKKITSCFLQDGDALVLKTDYLLRILEAINQSFPDMQYITSYARADSITRKRPAELKALRQAGLNHLYSGMETGSDRILKLINKGFDVDTVVKSGCMAKEADMILSEFILLGIGGKELSEENAVQTAKALNTIQPNFIRVHATGIKPESKLGEFVRDGSFTLQSEEEIVVEQKLFLQQLHEMDSYYVNEHIINLLLEVRGNLRTEKQEMLSTIDRFLALPTNEKLLFTVGRRLNIFFLLDDLKKPELHQEAEKNLQQILSKNPDVDFAALCNYVRQSQIMKCEKNQFNCPVEATLSLIGGKYKPLILWHLIDHPLHYMELQRLIPNATPKMLSQQLHDLENNGMIHREVIPEKPPKTVYSLTPFGQSIVPILDAMCQWGNNYLDGLDVQPPCCQSRKMDFITIAKQRMSVRDYKETKVEPEKLEQILEAAHVAPTAANLQPIRLIAVQSEEGLAKISKAANIYGAPLAIIVCADHDKAWVRPFDQKQTGDIDASILTDHMMLQATELGLGTVWVCYFKPDVLRKEFDLPANLEPVNILVVGYSDEGTGDPNRFNKQRIPMSQLVSYETLMNETEKKTFSAPSPGELEQLTELHKAMGDYTRMRILWYLMQKDSCVSELAQKMEVTESAISHQLRALWIVRLVQSRKAGKNVIYSLQDEHIRWILEETYAHISERMPHYNLPHNHGQNIEKVLNKMPSAEGFKDISFLFQQLGDPTRLRILWLLCHCEECVCNLAAAVDMSAPAVSHHLRILKKSGIISSRRDGKEVYYSLSDTPQAKLLHHAIDALFEVSCPTEQMTRKQRHLLTRIIVAAVLFLAGSLLHLPELAEMAVFLVCYVVVGWDIVWKAITNILHGQVFDENFLMTIATIGALILGEHSEGVAVMLFYQVGEWFQSYAVSKSRKSIASLMDIRPDYANIERDGKLVQVDPDEVQIGETIVVKPGERIPLDGTILKGFSTLDTSALTGESMPREVEPGMEVISGCINQTGILNIQTTKEFGESTVAKILDLVENASDKKGRIENFITRFARYYTPVVVFAALALAILPPLITQQPFSTWIYRALTFLVISCPCALVISIPLSFFGGIGGASKIGVLVKGSNYLEALANTEVVVFDKTGTLTKGSFAVSEIHPVGMEEAQLLELAAYAEDYSNHPISLSIKNAYGEKIDNSRVSDVQEIAGHGVQAVIDGKTILAGNTKLMEKEHIKYTPSSAVGTVVYLACDGKYAGCIIIEDEIKADAPAAIKLLKSAGIRKTVMLTGDADAVGKKVAGQLHLDQVYTELLPADKVDRVESLLKQKSEKGMLAFVGDGINDAPVLARADVGIAMGGLGSDAAIEAADVVLMTDEPSKIAAVMKIARKTIRIANQNIVFALGVKFLVLILGALGYANMWAAVFADVGVSIIAILNAIRAMRVKLPDMPAGSTNQGMKKTIKLLDLDCGHCADKIQNAVKKIDGVTSVSVNFLGQKMVLEAPDDQFDAVLAEAKTLIKQIEPDVTVKAMISSKKPHFSLDKKSSTLERTKEKQDKYNEKRSKTLCVNFMFGALASFPQDAKRPFSMILQKEQFDITGMTCSACSTRVEKSVAKLPGIKEVSVNLLKNSMVTSYDESVLDTAGIVQAVEKAGYGAIPKASAQNKSRTTTPAAKPEVSTAQVEYKQMKQRLLLSALFTIPLFYISMGHMMGWPLPSSLLGMENAISFAFTQFLLLIPVVFINFKYYRMGFKTLFHGSPNMDSLIAIGSSAAIVYGIYAIYKIGIGFGHGDMATVHSFMMDLYFESAGMILTLITLGKTLEARAKGKTSDAITKLMNLAPKTATVERDGKELQVPVEEVQLGETLIVKAGESVPVDGIVIEGFSSVDESALTGESIPVEKHIGDKVIGATTSKSGYFKMQATKVGDDTTLAQIVRLVDEATSSKAPIAKLADKVSGVFVPVVISIALIAVIVWLLLGYGFEFALSIGISVLVISCPCALGLATPTAIMVGTGKGASNGILIKSAEALETAHNIDTVVLDKTGTITQGTPVVTNMLCKEGVPQKEMLQIAASLEKLSEHPLADAIVAEAEKAQLSFLPVDDFKQIPGQGLVGQIGNETCLAGNRRLMAANGINGGALLQLGEEMAVDGKTPLFFARGGQLIGVIAVADVVKPTSKQAIAELTGMGIEVVMLTGDNAKTAEAIRRQVGVDRVVAEVFPQDKEKEIRRLQSVGKKVAMVGDGINDAPALARADVGIAIGAGTDVAIESADIVLMKSDLLDVSTAIQLSKAVIRNIKQNLFWAFIYNIIGIPVAAGVFYLPFAWKLNPMIGAFAMSFSSVFVVSNALRLRWFKAKHQANTERDSVPMHEQTTIKQERKGAIHMEKVLNIEGMVCGMCVKHVDKALRDIQGIKDVDVSLESKSAQVQLDQDVPDAVLKAAIEDAGYQLVSIQMKAKKGDIVHKLKIARGQLDGILQMVEENRYCVDISNQLLATQALLKSANQQILQAHIRSCVRDALQTDAVNPKLEEALKLLEKMIQMKQALDTRTKLLTKNPWPLMIELSIPAVLGMVVVGLYNMMDSIFVGQMVGDVQMGAISVSYPLTLINAGSAAMLGVGSASVLSRAIGKKDENTIKKIMGNLVAMVLLLSVIYTVVGMVFTRQLLSLTGASDNILNYAEKYLRIVFAGSLFVNFFQSANMVIRGEGQLKRAMTIIASGAILNIILDPIFISILNPYGMGIEAAAYATIFSQFVQAAITLWYFKKKSPHVKIGRIRIDGELLPQVLSVGISALLMQILTLVQQTVIYRVASNYGGETSQLLLAAALRFWNFSFVPLWGISQGFQPAAGTNYGAKDYDRVKTLTRVFIIAATLLSLVFYIPAELFPEKILSMFLTTPGIAASGATNFRIMFSTYILQGSFMIAVTLFQSLGKAKKATWLVLFRQIILFIPLCVVLPMIGGMGIRGVWLAIALTDAILVAIIAFMVAYEFRKLPATSSVNRMNENPITNATGLSAVIPKDNDGYCTVYKLDCADGLGLMTVYQVYPGIQLIYNDFEATSCYWDGNIGKNVLEINHCREGREGSVLQSGSCLYLGEGDLSIHTMDNCASEMSFPLKHYRGISVVLDLELVSENPPGILTESGIDIADFKNKFCADGSCFVMRAKDDIEHIFSELYSVPDRFQKPYFMLKVQELLLFLCMVNVKQEKQRELYTSPQVEIVRQIHKRLISNLHERLTIEELSKEYHINTATLKDTFKGVYGQPIGTYMKTYRMKQAAALLRQTQETIAEIANQVGYENQSKFATAFRDVFKIAPAEYRKQNSGDMAENNIPYKVRAALLLVPPNTPMPTGAVTQSLWYIAVRSGDVHRVQHYLRTERDTMEQLSARLLLTAGILLLIAEVIFAILQVWLYADLLWAGAFGCLMAALNFRDSKNDGGMQKIEVVVRITKDHCPPQEQTIFEWFDLMRNPTDALSRPDLEINLEHHRVFKHGTEVYMSRYEYGVLSLMAQHPGKLFTKEQIFEAVWHKDSESYLRAVTSTIGRIRQKIEDDKDHPRYIKTVSNIGYQFVPSSESVRLNRNLMQTFEEVLTHFHSFLESATYLDVVPCRWGYVRLFNEGNPINFNAILCRTPQELYTALENDLETEIQVSLGIDMMPNSDLKVLGEKVRKERKLAGLTQEQLAERCHVSTKHIANIEKGSMNPSYEILLAIARVLPVSLDALITPGMGKTEIELKEFNRIYLSCPEAVRETLMDSTRTLAKHLTEFYSKIENPMLDHKKKAITEHWQFCPKCNLKLYRMTADCTGFIHIKCWRCRKMLWLDLSIRAKMSFNNGNERRKLNAKWEHLRVQYREAGMSEDAIQAMYEFDLGVLNSERAYITNTMTVSGAADDCAAKETSDFKQYEKALTVTDTYHETKSRFAWIGEIENEQLLTALETLKVEDLEIITMYAYEGYDITEISKVYGVSRPTISIKIKRITKFLKNFNFNATNMNENDRTTLEQAIYEEMELTPEMIRSIRTLCGVCLCSFVESKAFKIAIVPSADRSMDTCTVCQTRRGHDYVVMKRMIQNWKFQRGDIFFTRFDNAIGSEQSGNRPAVVLQNDVGNFYSPTLIVATLTSKAAKKYTQPTHCLLVNDFLSVPSIVQAEQIFTIDKSRVLKFLGHLTPEEMSRVDDAVRASLALNPMGSIQRLPPIIRSTAAYAPPEVVDGKPPLYPYTPIKSSFEDAGSVEDMMLYTELEAAVHAMIQRLEYSFTFNPSLLTIPKRKQQVAEILKEAETYIWRIKEEMRCAMRLKDNTNPFIHVNPPYQLMVIHSSKLVYPRELYQRGVERKRVELIAAHFNEYVANEPKVSFRNGQFIVTDGQHTIEGRILRNGGKDLPILCKVYTGMTVEQEALLFAEQNGFSAPLTAGIKLRAKVVGGDAISKAFLAATNRVGLSLNYDSQQLTDYRIGCVGTAFRLYKQMGEPLYCETMRLIVAAWEGKPDSFRASVLKGMMHFVELYHGEFSEERLLRALRNIHPVDIYRIGQDDPAKLRGWKKYVFPIYTAYNGKCRKDALPMKFMKKWLIRCLTVLAMVCLIPGIVLNVKAADSIYTYCFVCMQQRNYEILGYTKVDSTKHRIHIKCSVCGRKNSIVYGDLSDHTGGTETPTCTTGKTCEKCGAEYGILGHKWKTPANASLGNGTHRIICLRCGLNGTASCTGGTATCTTKAVCEACGGKYGKRNLNNHALVHYDAQAPTCTKPGWDAFDTCPRCYYTTFRAIPALKHDLEHHEAKAPTCTEKGWDAYDTCSRCDYTTRKELPALNHALEQHAAKAPTCTEPGWDAYETCSRCDYTTYAELPAQHDLRHHAAKAPTCTGIGMARRYDSKEAKRRILTACVRLFLEKGYTNTKVAEILKEADVSAGSFQNIFRTKDGVLTELIGMMFSRQFGAVRPLAANAPSPVYLYAVETALQLAMTELSENLRDIYVEAYTFPATAEIIHRSTTAELQAAFSAYLPGCAECDFYEMELGTAGMMRGYMARRCDPYFTLERKIRRYLSMSLSALQVPAQEREQVIAFVAEIDMLAEARKVVDAVLASLSVQFDLKGMASFLLPRTVWLRQRITAMSIALCFARMRTRRKLSLVKLPKIRPMKIIRAKDYQDMSRKAANIISAQVIMKPDCVLGLATGGTPVGTYAQLVDWYNKGDLDFSEVTTVNLDEYRGLPKEHPQSYWYFMNENLFSKVNIDPAKTNLPDGTNLDTAAECARYNGIIHKLGGIDLQLLGIGPNGHIGFNEPGEAFELETHCIDLAPTTIEANKRFFDGNENLVPKQAYTMGIKTIMQARKVLVVANGKAKAQAVKDAVTGPVTPACPGSILQLHPDCILVADEEALSLLMEQRRNQIVELVNRKGSISFAQLKEAFPSVSEMTLRTDLKALDEARRVVRVHGGVKSVEQVVGTDDLLSRRSARNAEAKQIIAEKAAALLRPNTTLFLDSGSTATAVARCIPDQPMLIYTSGLSCAMELAKLEKPHVSLPGGSLNRFSLSVCGAQSIQTMEGINFDLLLLGVTSYSPETGFTCGVEDEARLKQTVLRRCEQKAVLLDSSKIGLKSTFHICELSDIDIVISDGKLPVEFLQACRNAGVTVLMKVKAVRLHAANDLRLDTFELPEIKDDEILVKVVSDSICMSTYKCAILGTGHKRVHPDVAEHPAIMGHEFAGDIVKVGKAHQDKFKPGMKFTLQPALNYKGTMWSPGYSYEFFGGDATYCIIPAEVMELGCLLEYKGRAYYEASLAEPMSCSIGAFNAAYHTKMGVYHHDMGIKKGGKLAILAGAGPMGLGALTYALHRDVRPGMVVVTDINEDRLARAESLFPPKEVKEKDGIDLYFVNTANMADPAAELRELTGGTGFDDVFCYAPIAPVVELSSAVLGRDGCLNFFAGPTDKQFSAKMNFYDVHYNSTHVMGTTGGNTADMIESLELTAAKRIDPAVMVTHIGGLNAAAETTLNLPKIPGGKKLIYTHLTMPLIALTDLRAKGEQDNDPRYTALADIVDAHNGLWCPEAEEYLLANFNPEDMIYTVTLNPALDKTVEIPNLALDTVNRITKMRTDPGGKGINVSKVIAKLGGTSKAIGILAGNSGKAIQDALDSEGLAHNFRFVPGETRTNLKVIDPENHTNTDINEPGIEVDAPELTALLYDLLKELKQGDIVVLAGSLPKGAPKDTYYTWVESCKKAGAKVFLDADGELLAEGLKAAPYLVKPNNDELSRMMGRELKTLDELADAGQALIRRGIEHVVVSMGGRGALYLRKDSVIYAPALKVKVGSTVGAGDSVVAALAYAEAEGLSEENTVRLSIATGAANVMCSGTQAAERSQIEELLPLVTFQHLMGAVYREELSANARKLIEQLLSLPQGWVTAAALAESIGVSRRTVLRELPAVEQWMQAAGAHFVRNPGKGLLLDEAPERRDALRTQLNSGDRKELSRAERRQQLLTRLLSEQEPCKTAVLARALGVSESTLSADLDELETKLHPYRVEMFRRPGVGVWLQGDASSYRRVVSALLRSSMPEKELAEVLCGRMPENEIFSTLLDTKTAEKVWAALQQFEQEEQLHLPDAGFLALAIHCTLTIQQLRQGGDKGSAPRGLRPAGNHAARLVAALNRAFGLTLPPEEAQYLELYLSAYLGAEDPWGSAQEMELRNLEAALIREMEKALHTDLSGYTSLRDDLYCHLRPMLLRVEQNIRTENPQLDTIRTAYPGLWKATRTACDAVQQQFVLPAISDDEAAYLAMHFGAVLEQNAMFRLRLRVVVACPLGMGSSRFLASRLGNEFPSLQVEGCCSVRELNTADLCRRKIDFIISTVPLELDYPAVCISPSLLEPDRAVLKDAITRYSQNRAEPEPAVQPVQDAPHAGSKLQYYARLTRSMTGLLEHLTIQPVKAPGSRAALIHAAAQLFCPQEADARLVEQQLRRRETQGDTYIKPLYALLLHCRTSAVKDCRLGYLQAQPPVYEPGRIVLGALVLLAPDNGNGVPVEVMQNVSGQLIETPRLMEALRTGQQQEAADLLEQGFDRGFFADCKPPHTKMKNAVSRFGKFLSGMVMPNIGAFIAWGFLTALFIEAGWFPNEKLASMVSPMLTYLLPILIAGQGGKMIAGDRGRVIAAIAVVGCICGSDYTMLMGAMVMGPLAGWVIKQFDKKVEGHIPAGFEMLVNNFSIGILGMLLAILGYYVIGPFMTAILTVLTAGVDFLVAHSLLPLVSIFIEPAKVLFLNNAINHGIFSPIGASQAAETGRSIMYMLEANPGPGLGVLLAYCFFCKDDTTRQSAPGAVIIHLLGGIHEIYFPYILMNPVIIIAPIVGNFCAILFYSMTGAGLSGPASPGSIIAYMAMAPRDSILTVLLGVVIAGAVSFILSSVILKATSGHTKSLTDAQNEMKEMKAQAKGEIPEPTAVNVGQIRKIVFACDAGMGSSAMGATKFHNRIKAERPDLTVTNSSVDTIPADADVVVCQRVLADRAAKCAPQAQLITLDNFLADPHLDALYNALTSTSPALDAKAEAAANEEIVSDLRNAAVAPLAAAVTEASKANGSVMKIQAEDIQLGLPSVTKEEAIRAAGALLAKRGYVDETYADAMVEREKLVSTYMGMGVAIPHGTSQKKGTVKKSGVVLLQYPQGVDFGDEKAYLVFGIAGVGNDHLDLLGNVCEILEDEDALEQLKTTSDMNYVLEHLQMKSIDITIQDKEGLHARPAGILSKAAKGFESKVTMTKNGKVADMKKIFAVMGLAVKCGETVTIAADGPDEDAAIEELTKLCKDAMENPYSHTHPPYHVGNHGHDLVIMRSPKMLTPNEYDVFFSFLENTVMKNAYMNKLLPCRYNTDSNRVEARFEDGTTLAIDCIAVEDEYSNTPAQRAELDWLLYNKPLEYAQLVLGGRMERYLSLGCDHGRMEDMSSTEMKSYLSLIPISAKVRRRQNRMTILCIVLAVFLVTAVFSMADMAIRMETSNQLNKNGNWHIMVKDISPETAAELAAQEDVAAFSAYSDINASLKENYFAGDKRAALVGADDAILQIFPGMQCSTAPADGDVLVTANIRDWLDVTVGTAIPLTLPDGQTISLTVAGFNEDTSDANQYDAVVLVMNRSTFSQIAAQAEESFETQYFIQFKPHTNLRQSIVNIENKYGISEEKISENTYLMALNASSNNDYIVGLYAVAAVLAGMVVLAGIFMITGSINSNVAQRTSYYGMLRCLGAGKNQVRMLVRLEALFWCKTAVPAGCVLGIVSTWGLCSFLRRFIGEEFSSLPVLGISPVGIICGSALGLITVWFAASSPARRAAKASPITAATGNAVENAAGSPCHARLFGSRAELSLGVSHAISSKKNLLLMTGSFALSILLFLSFSVLLRWVGFALNPLQSYAPDLSVAETSGQNVLDPVLVEQLEALPEVKHAFGRMYCPLPAEYQGKQGFIDLISYDTIQFGWAKKDLIGGTLPQEPEDGTYPVLTVFDKSNSLTVGDTIQLEDAKLTVVGVLNDSPFSSTDSPIVICTEETFHQLTGQNRYAVIDIQLKDTTADAAIAQIHTLLSDTLNKQVVFSNRIEGNRMIQSTYWAFHLVVYAFLIVIAGITILNIVNSISMSVSARMKQYGILRAIGMDDAQLKRMISAEAGTYAVSGLVVGIALGLVLNRKLYILLITHYFGAAWQMPWGCLAVIVVVVLAAVVLAVYNPVRRILMQPITATISELMELLEVNHLCKTYGSGETAVHALKDVSFSVPKGEYVAVVGESGSGKSTLLNLIGGLDTPTSGKVLIDGKDVFAMKDRELTIFRRRNIGFIFQAFNLIPELTVEQNILFPVLLDYQKPDRAYLEELLTVLNLKDRRKHLPSQLSGGQQQRVAIGRALMTRPSLILADEPTGNLDTQNTSEVIALLKETSRKYEQTILMITHNRSIAQTADRVLQVSDGCLTDFGRCREMKVFANREIRILFRTVLAVWAVALALTQGIVWHTTHVFSFGLLLVFLLLGGCLWGVLFRYFQRQSALLEQAVQQIQSCLDGNPDARLDCDREGEFYRLFHSVNALAAVLSAHADNEQREKRFLKNTIADISHQLKTPLAALNIYNGLLQDEAVSPSEVKEFTDLSEQELDRIETLVQNLLKITRLDAGSVVLEKKNENVAEMVQDIARQYHYRAEQEQKKLVLSGSEAVTLWCDRDWMQEAVDNLVKNALDHTKNGDTIQVEWNALPSMVQIKVRDNGSGIHPEDLYHIFKRFYRSRFSQDTQGIGLGLPLAKAVVEAHHGTIEVDSELGKGTTFTLNFPIPTKLMRKLFLLEDDLSLISGLTFAFKKQGFALDTARTLAEAEVLWSDRKYDLLVLDVSLPDGSGFDFCQKVRRTSNVPILFLTASDEEMNIIMGLELGGDDYLTKPFKLGVLLSRVNALLRRANASSAGEPVLESGSITVRLLQGQAYKNGILLELTGAEYKLLCFFMQHPNAVLSKEQILDALWDCDGDYIDSSALTVYIRRLRMKIEDDPGKPQMLLTVRGMGYKWNGMLRKTALPLKSPTGAFIATQTRTFRKVQSGEDLFPMKIFTAPQHIRSILPPIHPTKSSLRCVGGIFLFHKMDKPCDWEAGKKHRCTSAMLRHLRVAVMEMCEQADLNQINLLEAQGDHVSEREYWAQRRGQRRLDHANAKLAAEGQQPTQTVYQTELDKLRKQIYACIKNELRDNFLRKLRLLSIAFHSIHDKNCSTAAMLEQLFKSQIATVSDPYQCNCITDALAAAGIKFYCKTKDANRRNAFDQARIGTLGIKPKYITEVFVDKENAEMALHIVHTLPNQENFMKDRDPARVDNPFLIEELSEERPGILLWMLEGLHRLLANRYQFTISERSIQNLEAAMADSDNLTQFMQATAYVRFKPDTEERSTYLYRAYTKWCEDNLESPVPQKKFSQFLLKNAGKYGLTFSKHIEGKYRGFRGVCVHPAFAAAMTNVRKNSAKLTREDLKIAPESPTMKRQELAVPCEFSVRNSMVISDETSDQTPAVEPSDQTSKTVRHAPLVYRVEEIAQLLAISNRAAYNLCNTTKDFKVIRLGTSIRVSKQSFDDWFAAVMKRGNTYSVRYNYKDHAGKPCKGWETFKTKAEAQERKITVEKELLDGTFLVPDTMTVEEMLYKWIPIQSSKHKWSPKTYTQSVAMVQNLIVPYIGKRKVQDLRTYDIEQFYATLSQTPCGQYVHGEKQELTENQKKRLLSSTSIHEVHTLLKTAFSYAVDWDLIHKSLTPREAPKINTEERTIWDERTMLAALQTIENPALHLAVHMSMILSLREGEILGLQPGDLDFDAADGRGTISVNKALQRADKVALSKIDPTQIYHTFPDRREGSKSSLILKRTKTKKSNRILYMTKPLKEELLAWLEKMKQDEQSAPEKYSNCGQLFRLPDGLPIAPDVLTKWYRMWRAEHPEFEKIVFHGLRHSSATYQLLQSGGDFKSVQGNTGHATATVLMDTYAHTQDKPRLELTEKIEADFYTQDVAGAKPQEPPENKTPVATKITGKMILEAIRQMDAEERRELTRVLFAMAFLSCEEMLAAARSQKITLAEAVLRSDLEESRLTEAHSRAAMRHLWQVMQATSQEYDPTQRSRSGLSGGDAAKVEQAWQQGRLLGDDYLAAVTAEALKTAECNACMKRIVAAPTAGSCGVLPAVLLPLARAGQADEEAVCDALYVAAGFGQVIAARATLAGAEGGCQAEVGAASAMAAAALCNLKGGTPEQCAAAAAMALGNLLGLVCDPVAGLVEVPCIKRNVVGAVNAVSCANMALAGVDYAIPCDEVIDAMGRVGSLLSPDLRETGQGGLAATPTGVKIARQLAQEDMRLFDVLGPVMIGPSSSHTAGAAKIGYTAQKLLGEVPAQADIGLYGSFATTGKGHGTDRALVAGLLGLRPDDPRLPDSFALAAQRGMQFSIHPVELRSAHPNTAVLTLTSRTGRQLSLKAASVGGGRIRVTEIDGVPADFGGDSNTLIIHNEDTPGCIAEVTMALALRRINIASMQVFRAAAGGYAVMVLECDSHIPHALERQLAVMPGLLKVTCLNVDEPEETEEMKLVSVETPEKSVCKMTFSATAEELEAASNAVYERTRATYTIKGFQKGEADRAQIEADRGEHTFWYDAINDLMDQDVPALYEAALKEHGFAPVDDPSYDLVSVKKDEGFVATATVALQPELKLTKTTGFTSQCVTPEVTDKEIDTVLERRRNYAAELVPHKGPAVKGNVVHMDFEGLLDGVAFKGGTAKDQSVQLGSGRMIPGFEDGILGHKAGDEFEINVTFPKNYPNKELAGKPVVFKIKLHDVCVRQLPALNSDFAKKMGKETMEEYRAFVKQQLFDGRHGGALNHAKDQILGQLADAAEGEIPSILVENAYQQQMQVIQQQLQMQRMSLTTYLSQIHETRESFTAKVRAAAEKNTRARMALLQIAQQENLLPTDEEIDKQLAERAEKTKKTVEEIKAGTDVAALRRNEGIRKAADWVIDHSTIEEKVESKMHLLFTVLVTFFAGMGAGLGTGFAGMSAAAVISPMLITFLHMDPYMAVGIALSSDVLASAVSAYTYHKNKNLDIKNGLIMMASVLAFTVVGSWVASKMPSATMGGFSVFMTFLLGVKFILRPVMTTKEAMQGVSAQKRAVQSVVCGVLIGFICGFIGAGGGMMMLLILTSVLGYELKTAVGTSVFIMTFTALTGAVSHFMIGGTPDWLVWGLCVVFTLLWARIAAVFANKATPKTLNRATGVVLVVLGVVIMGFNLLTMNPTIEISFKTAQAYSAMCKPLCQELKLPQTAFDILMFLANNPDCTTARDIVEIRKIKANLVSVNVDRLVQEGYLERRAVAGDRRKTQLLCTEKAQPVIARGREVQERFFARLLDNTDAPTREAFFRTMEVIGKNLDEILKENGMTLKELQIGKSAIVDAVGGAGALRQHFLDMGLIPGAEVTLVKLAPMGDPMELRIHGYELTLRLDDAAQITVTPTEKTPAVHVPVDGKMVEHPGLGEGGKYHTKEGEHPLPEDKTLTFALAGNQNCGKTTLFNQLTGSNQHVGNFPGVTVDRKSGAIKGHPETEVTDLPGIYSMSPYSSEEIVTRQFIIGEKPTGIINIVDATNIERNLYLTMQLMELDIPMVLALNMMDEMRGNGGTVRINKMEAMLGIPVIPISAAKNEGVDELVDHAVHVAKYQERPGRMDFCSEDDHGGAVHRCIHGILHLIEDHAKAAGIPVRFAATKLVEGDPRIEEALKLDPNEKEMIEHIIVQMEQERGLDRAAAIADMRFSFIQELVAQTVVKPHESKEQLRSNRIDKFLTGKYTAIPAFIAIMGLVFFLTFNVIGLFFQNLMEMGIDALTGVVDTALTNWNVNAAVHSLVIDGIFTGVGSVLSFLPIIVVLFFFLSMLEDTGYMARVAFVMDKLLRRIGLSGRSIVPMLIGFGCTVPGVMASRTLPSERDRKMTILLTPFMSCSAKLPIYSLFAAAFFPKYAGLVMVLLYFTGILVGVLAALLLKSTVFKGEAVPFVMELPNYRLPGLKNVAQLLWEKARDFLQRAFTVIFGATIIIWFLQNFDLRLSLTADPQTSILARIAGDIAPLFAPLGFADWRISTALISGFMAKESVVSSLLILFGSTAALTAALTPAQAAPLLVFCLLYTPCIAAVASVKRELGGKWATIMVVNQCAVAWLCALLVRLVAVALFMAILVSGGAGYIGSHTCIELLNAGYDIVVADNYYNASPVVLDRVKQITGKDFRFYKADMTRREDVEKIFSECPDITAVIQFAAYKAVGESVSKPIEYYYNNLNCTLVILDVMRHHDCHNFVFSSSATVYGDPASVPITEDFPVGATTNPYGTTKAFTERILQDVCKADPSLNVALLRYFNPIGAHKSGLIGEDPNGIPNNLMPYIAKVAVGKLEKVHVFGNDYPTPDGTGVRDYIHVVDLARGHVCAIRKLETGCGLFICNLGTGKGYSVLDVIHAFSKACGKEIPYVIDPRRPGDIAECYADPTKAKNELGWVAEYGIEEMCADSWNWQKNNPDGYHTVKMRKDATKIYLNKESAPCSRRQKAVCFKQTGQRPAQREKARNTMMAQIRSKPFGVTKEGANVTEYILSNPGGMSVSVLDYGCVIKNIIVPAKNGPVDVVLGHDTMADYENDFTSSGSTCCGAFVGRYANRIENAVFTLGGKTYQLEKNNGENHLHGCFSRKIYEVKYFGDTLLMEAVSPDGEDGFPGTLKIAVRYTLTDDNTFRMDYRVSSDADTIVNLTNHSYFNLDGGGDVLNQKLRIYASRYLEGNNATCPTGNILPVANTPMDFTAGKTIGKEIDTGFSQTTMVGGGYDHCYVIGRARGSSQSICAWATSDKTGISMKLYTTQPGIQLYTGNFLQDCPAPGKGGEPMRKYGGFALETQHYPCSPSHPEFPSTVLRAGKVFRATTTLRFFTGKQCGKLMHLVCIYDYITVLQFCVGILLELPSNFCGDFLLESSKVPTIAKSAPHFRWKCGALWMEKFSVKKPFTVLVAVIMVLMLGFVSITKMKTNLLPNVSTPYLMVVTVYPGASPERVETEVSDVLQNALTVPGVSKITATSAENYSLLLMQFVDDTDMDSALVQVSNKLDQAKSDLPETALTPSVIQYSMNMNAFMTVAVSREGSSVYDLSDFIKNTMTPYVQRKGGVSSVSSSGLVEQLVQVQLNQEKVDAINEKLMELIDTQLEVAHTQLEEAEAKIKAGRAEYDKQFKNFGNTVSNTVMGTLSSEVGEAVEVVRKQAEALLQSVNNLIAVVKEPEVQQALIEVQAGLQRVMDKFNNTGMRDIDSLIEIVSELRDITDKLSSALQTLQNRINTETGTQGEGAADLADELQLQDSLNVIYKTLEDTIKAMDNVPGMMSEFSKALGNFTQQQMVAYMQFTEAREQLNEYEKQLSEAKTQYEAAKEKALASADVTKQLDIKTLATLIYAQNFSMPAGYVKDESGESWLLKVGEEYDSVDDIRGALLLHVEGYGDVRLSDVADVEIIDNAADSYTRLNGEQASVLKIYKDDSSSAGDVSANCLDAFKELEAQYEGLHVVVLSNQGNYISILIKSILTSMLVGAALAIVVLAIFLKDVKPTLVVGVSIPLSVLFAVVLMYFTGLDLNVMTLAGLSLGIGMLVDNSVVVIENIYRLRGRGVPAARAAVQGARQVGMSVVASTLTSVCVFLPAVFSASLIRNLMGPMSLCIGYCLMASLIVALTVVPAASATVLKNAQPKKLAWFDKIQNAYGRSLEKALQKRFVPLAAAVLLLVFCCWRVVSMGIVLLPTSTSNEALITLSTTDTLSKEESYDVAGKVVQAVMAVDGVEEVGITPDNTVAGMDVSNLGLPSTITDLLNAANGYGKYKINVKLNEELSSSKIDAACKAMEDAVAGVADCTATVQQYGMTDDLTSQLSTGLTIKIYGTDAETLTALSEKVVDIVNNTEGFQNATNGLGAGDSTIILQVDRDKVRANGLTVAQVYQQIAAKLTTTTTAQTPVTVDGTTMDVQISNNLDPLTKENMMDMTFETTVMSADGTTATGTCKLSDIASWTTGTAPDSITSENRNQFVTVTAETAPGYNTTVQARAVKKALDAFALTDEMPEGCSFSMGGESDSVNYMTDEMIQWMALALPFVYLVMVAQFQSLLSPFIVLFTVPLAFTGGLLGLLLTGQQLTMISMMGFIVLMGTVVNNGIVFVDYANQLRMGGMERRAALVATGKTRMRPILMTTLTTVLAMLQMVFSNDMASQLMSGMAIVIICGLSYATLMTLYIVPILYDILFKKPPLNVDIGSDEDLDDIPDDAAEFIAAQSSAAQPQPEAMYKNGGHLHFLLLQQGLGQARPNKSTSETRKSLRSEVPDGQKIFKNMKQNVLNTDLTGKVAVVTGASGTLCSIFAKALARAGAKVALLGRNMDKLKELADEIEAEGGTAKGYTCNVMNKANCLQVAEDVLADLGPCDILVNGAGGNNARANTDKEYFEMGDLESDTVTFFDLDESGVEMVFNLNFIGTLLPTQAFARQMVGREGCNILNISSMNAYLPLTKIPAYSGSKAAVTNFTQWLAVHFSKVGIRVNAIAPGFFASEQNAKLLFNEDGTPTERTKKILAATPMGHFGDSEKDLVGALLFLLNNDAAGFITGICLPVDGGFSAYSGVMGEQKTTASSVNRAKTYQLVLFPLNNGATNVYYVLVLSYIATFGSKVLALSMLFASVMVTGMRLFDAITDPIIGALMDRTNGKFGKFRPFMVIGNLIMAASILVLYCLTPLIPASAMGLRYAAFVGLYAVWVIGYTFQTSCTRSGQTVLTNDPKQRPLFTIFNTVGSLLGMGAMQFFAPILAKNYEGGYASAGFFRTLAPVGIVISILLTLLAVIGIWEKDQPKYFGIGGEKTEKIKVSEYLQIIKNNNPMQRLMVAGAGCKLALSIATNTTVLCMLYGCMMGNYDGLYLPMMVLGYVCSVPFFLLTVRTSQKEGQKASLMKYVSVALVCYVGVLVLLLLWGRGDAFTLSILGENGLSLNLYTILFIAFFGIGYGAYYATADMPIPMVADCSDYETYRSGNYIPGIMGTLFSLVDKLVSSLSATVVGIAVSFVGLQSLPTQYDPYTPGMNWVVIVLFCIIPMVAWAATLIAMKGYTLTGAKMKEIQAVNACRRDAVAKGMKLEEAMDKWRTMDQLPAEYRSMTFLKKQGAAFYFNAVAIVLAVAGIVTMVMSSTYSEANALAALTRLVIQGVLAVVLIAGGIWAANKGKDDNGIIGLAATMAAIALIVATIGNIINSRILLISGLFSFNSQNMVGWHVFYITVACLVCYVVAVVAMIIGSFCKVTKMAKKSMVLRGLTALLTFVFSLSIVTGVTLEGYKSTIDTNLGTQSEKFVSESTDADPLYNKFTPSAEVLNEDGTGNSHALIQKAMNLNRQQAAEGAVLLKNENNALPLASGSKVTLLGIRSHVPLVGSSFGVKAWGGFINLEQALSQNKTDFANTITTSVNTNRQTGETTVGRTVSSWSGDEFEFEGAGYEINPTMVSIYEKLNETYNHANNESPAEVYDPGEPSLAEIAAVDSNYESSFAQYGDASIVVISRPSAESKDYLPGGIAEGLGADEPLALTTNERDIIETAKKASDKVIVLVNSATAVEIGDLKNDPDIDAILWIGFPGCYGMVGIADILCGRTSPSGGLPDIYPTYNMSAPAMQNMGKMYYTNTADVITRSGGLLSFTPGAYTIEAEGLYTGYRYYETRYADCVNGVGNAASPVGAYASSTEWNYDNEVAYGFGYGLSYTTFTQEIQGQPEISVNIDSETGAPQAYATFNVKVTNTGKVPGKTSVQIYGQAPYTEGGLEKVAIQLLNFEKSSELAPGASEIVSVKVDLQYIASYDMEHDNGDGTTGTYVLDPGTYYFAAGNGAHDALNNILVLQGADESKMVGTGSAAAAVAQEITEDLISRTAFSVSKTGEKISNQIPYADWNYYQPGEVTYLTRADWAGTFPKTYDQMTLTSEKLISDLNGNYYTIATDDDTSDIKWGENSNLMFYQMFGLDFDDPKWDELLDKMTLEEAQYLATYGGPSIPGVESIGTVETYMTENAGNGVAVNLNASKDTNAPWTIGADDPNGNWHPEVFANAPLVAASFNNELYKAVGEFVGEESLFVGIPILWGPGMNTHRQAYNGRNGEYYSEDPVLTGNAGMEFAIGALEYGLIAAPKHYAFNDQESERGGVSPYMTEQRAREIELRAYQIAFEATKYDTDDYDAGMRGLMTSFSKIGGVECTSSVGMNTNILKKEWGFKGYAVTDIYDDTDLYGAVLNSGVTCFDTRGISGFYGSTTLETDSTFATQVDGSSVSSTLLNGDANLQQHVKESAHNILYAMAHSNLMNRYNSTTRIVQSMTWWRAAYIALIAVSGVLTVACGAGYVFSVRKKSKKEVHMRTGSEHRFCTLKKLNPKEESEPENSCLVRQDKNDVKRKGEQHGMRNIAKLMKDWQFTGPDGVTAAVALPHTWNAVDGQDGGNDYWRGTCTYRTDFAAPVFDPAQQQVWLQFEGVNSSVTVLLNGQQLCTHDGGYSTFRTEVTELLQAENQLTVRVDNSVNDHVYPQKADFTFYGGIYRDVSLLVVNKNHIALGHFGDTGVKITPVLKEGSADIQVETLVEGEGTVAVELLDAEGSIVAKGEGEKTSLHLDAPHLWNGVKDPYLYTCVVRLLQDGQPVDEVTTKVGLRSFSVDAKKGFFLNGKPYPLHGVSRHQDRKGLGNAITREMHDEDMALIRELGVNTVRLAHYQHDQYFYDLCDKYGMVVWAEIPYISEHLPNGRENTISQMKELIHQNYNHPSIVCWGVSNEITISTKDKADMLDNHRVLNELCHKMDPTRLTTLACYAMCGPFNPVAHITDLVSWNLYLGWYVPGLFLNDLWMGFFHLVYPNRPLGFSEYGAEGMPNLHSAHPRRGDHTEEYQAKYHEYMLKCFDRHPWLWATHVWNMFDFAADARDQGGEPGMNHKGLVTFDRKTKKDSFYLYKAWWSEENFVHICSKRFTDRTEKEIEVKVYSNQKTVALYADGKKLAEQTGEHIFKFRVPLHGKVELKAVAGDCIDTACFRSVATPNPSYKLVKTKSKSANWVMEGLRRLSFYGLLDTSVCEKYTNIGVCIWKLKTECARKTTDFRGHLAKIGRFDKITTKEKCTEKLPEHSKKQEESDAMTTSLLNSLLRALLRWGAALVFCLPLRHRSHFWGRACGMLFPLLLLAQLLDPLAQSTTLWQQQLLLLVLYVSFFALLGGMIYLCTDINKKGAIYCAVWSLLIAQCAYEGWCYLELYFAKHGHPLNMASPWAVLVQLLSGTVFFAAVYLLLARQLPYKGEYYIGPRQLLSSFFIGILFMVQAAVLDNFRAEQFPQSLVATILIGQFYFITLLYFQSELFKKSAMEKEMNALNLLYERQRQQYQVARQNVQMINKRCHELKVQIANLRKLSPEAVPQERIEEAERAARLYDANRNTGNEVLDVVLTEKSLLCESRGIQLNAVANGSCLGFIEAGNLYALFANALDHAVESAVQTARPECRVIDLLVCVRQGFVVVNIISPLRPPEQRANRSAQYELKVIRRIVQKYKGTLTLEEQGEFFAEKIIFPLQKMFRIAIVEDQEETRECLNRFVRQYAEEQGLQVEISLIADGSEIAEHYTPGFDIIFMDVEMPRLDGFGAAEAIRAVDAEVVLVFVTNMAQYAIRGYEVDALDYVLKPVNYYQFCTKLSRAIQRVQRRRGGQVVLQLAGGGIQLLDTADIYYLETHSRMLYYHTAKGEFAVRASLQSAEKQLAEYHFVRCNQCYLVNLVYVKGIESDFALVKDDRLEISRRQRTAFLTAVASYMGGVLMSTVEGKKQEKRRALLDAAYELFLERGTAKTSVEDITSRAKVGKGTFYLYFQDKGAVMQALLGRVSYQLLSDACLAVEQHPELPDFTAQVVFVIDHIIEALRQDVLVLRFLERNFVWPGLDQIEASREAEPLMRKLLAIVLSSPEMAGRSEREVYQRITALGSMCMSVCYSSILEGKPDNIDAMKPVLYDIIRRALSPEKMKKIAQGIVRLRKLILTVAVLLLIPSAIGAIATRINYDILTYLPQDLDSMIGEVALEDDFHLASTGMITVEGLPTNELIAMKKEIEAVPGVTQTFWLSDVIDPSIPTAMLPADVQQFMFGKNDSTMLIVRFDAPSASDETMEAVKQIEKLLRKDCFFGGMSVILQDTKALVNQEMPLYILIAVGASLLVLFLSLESTITPLLFMLGLLFPIAYNFGTNIFLGQISYITEALATVLQLGVTMDFSIFLLHRYQEEKELRSTNEEAMVSAICKTMTSISASSLTTIAGFLALCAMRLTLGRDIGLVMAKGVALGVICTVVILPSLILTFDKWVEKYKHRTVIPRLTKLSYFVSKHSVPIVVVFILILIPFAIAQNKTSVYYTLFDSLPQDLTGIVGTNKLGEDFGMTTSHFILVHDDLTATQVSDLCDELKDVDGITQVVSLDSITGPGFDTELLPDSVMEILQSGGYKLILANSSYKTGTDAINSQLDEMIGLIKNVDPEGVITGEGAMTKDLIEVADVDFKNVNVWSIMAVLVIIAISFKSISIPVLLVASIEAAIAINMGIPYFTGTQLPFIASIVIGTIQLGATVDYSILMTTRYHEERAFGRTPKEAAQQSLEHCSQSILTSGLTFFAATVGVAAISKMELLRSICLLISRGALISMLVILVMLPAALMLCDWLIRHTTLKWMIPESANAKKSEKEMKKSLRFASAALAVALAASCAAPAFAAGGSSFTKSETVYAVMNADGSIQSTTVSEHVYSASGLSKVTDQSTLTNIQNTESSAEFTQDGEKLVWNTDDTDVYYKGDTDRALPIQATVTYALDGQEAALEDLIGKSGHLTMTIALKNNETGTVNVNGTDRTIVTPLVTAVGVIFGQDATNVVAAHGLVESAAKSNVAAFVTLPGVKDSLSGLLPDELDTIEDYLQDTITVEADVTGLTCPQVMMACATSAAALGTDNVFDLSSLNDLTDGINQLNDAMSQLLDGASQLENGTSQLASGVLALLDGANTLNNGAAALDEGLGQLTTGLDTLSSNNSALNSGAQQVADGVLASANKTLKEGGLIDTDMTWDNYAAVIDNILTINDKTLAAGRRKMVRTIWEQAPSFKDSQLDLALYLSATKTNHDLEAALHLMQNYDPSMLCGLVQLLTSQEAKDTAKAELKYQVENSQDIADVRALKDSLSKIQYFVSSVGQYTAGVQTAADGAHSAKDGSAQLAAGTKTLYDGVNTLSDGASQLNDGTHQLNDGLNQFNEEGISKLTGALDQDQLHGLKTVLDEMTDRLESYTSFAGAPEDAESSVKFVYKTAETVAAADNVVAETETVKEGNIFTRLWQRIVNLFKFDERAEALTKAAVELTTAEAPKWEFIAARLLNHSFRCRNAQEWEGRGVCDLYGKLRYLTDKGLYGDYILAHYTHEEIAMAEDFLCPERDELFTYSGLDLLLKRYVIQSRSRVPLETPQEMFLGIALHLAMNEGSDRMGWVKRFYDMLSRMEVTMATPTMSNARKPYHQLSSCFVDTVPDMATPTMSNARKPYHQLSSCFVDTVPDSLDGIYRSLDNFAKVSKFGGGMGMYFGKVRAAGSTIRGFQGAAGGVIRWIRLVNDTAVAVDQLGMRQGAVAVYLDAWHRDLPEFLQLRTNNGDERMKAHDVFPAVCYPDLFWRLAEENIDAPWHLMCPHEILTVKGYALEDYWGTEWEKRYLDCVNDPRIEKRSVTVKDIVRLVLRSAVETGTPFAFNRDSVNHMNPNGHTGMIYCSNLCTEIAQNMAPIEHISTEVHTENGDTIVVTATRPGEFVVCNLASLSLGNLPVEDEAYMERTVETAIRALDNVIDLNFYPLEYARLTNQKYRSIGLGVSGYHHMLAKRGIHWESDEHLAFTDAVFELINYAAVKADTALAREKGRYALFEGSDWQTGAYFEKRGYTSEKWRALAKTVAVQGMRNAYLLAVAPTSSTSILSGTSAGIDPIMKKFFLEEKKGSMLPRVAPELSMDTWWYYKAAHLIDQSWSVRAAGLRQRHIDQAQSMNLYITNDYSMRQVLRLYLEAWRAGVKTIYYVRSKALEVEMAQEYLPAPSNIRLADLMKERNISQPELAKELGCSKSTISRFISGAKGTLTHEQVLKIARLFNVSTDFLLGETNIPDRKNYDIAELGLSVEAAKNLYTGRVKAEVVNLLLENARFAELTYRIAQYFDDTFASGIAAQNAMLTTLSTLLRTKVKTPEAAKAAKDISLRRKPVYQGDLDDIETYFMATVKEIKKGIGSHYAEQESMSKKVAEKMFNELTKGQDVQHPTITAEQLTDAMLDSVSGMEGATPEALEQLRSGLLGILQSAAEQENAHEADEMKQTNERLCALAQKGDATALDSLIDNNKSFIGKVGEMNLAQAGLNLDTDDLKQAGNMGLWKAVPKFDAARGMKFLTYAAPAIRNAMMDMVRDAFAAFEQRMVTEDKDGVCYQRISLDDVLPGEEQLRRIEAIADPYAMQPQSIMEEQESRRELYDGLKRLTQREQTYLLYRYGFTDGEEHPLIGTAIYFHLTKGRAKKTEEQAMDNLWLELPWWFVMAGTAVVVCMNEKKNRDCATSFLEIYVQPYDFEKIVDRMKKVIYLFVLCMVLGLAGCGQSQENKESSTESTSVQVENKNVSDIVSNEHLTNNDTANFQMPEEGYYSNDFDEILNITKEDDGTYRIEYSVTHLLYVENAIGTYDSETGILSFSGKDDRGNDIKAEIENKGDHLEVTVTQSNYEDIIGTKQEFFQADEMMKLLSCRYNMDTNRVEARFEDGTVLSLDCIAIEDEYGNTPAQRAELDWLLYNKPLEYAQLVLGGEIEHYLSLGRDHGRLEDDERAEALTKAAVELTTAEAPKWEFIAARLLNHSFRCRNAQEWEGRGVGDLYGKLRYLTDKGLYGDYILAHYTHEEIAMAEDFLCPERDELFTYSGLDLLLKRYVIQSRSRVPLETPQEMFLGIALHLAMNEGSDRMGWVKRFYDMLSRMEVTMATPTMSNARKPYHQLSSCFVDTVPDMVCVGIDVAKDKHDCCILDSDGTIRADCITIPNNMDGFKQLLQTIRDCTKKSDKIKVGLEATGHYSYNILGFLLDNDLAVYVMNPLHTNLYRKSLSLRKTKTDRVDARTIATMLLSDVDLKSYTDTAYHNEELKSLTRYRFDKVRERAKLKQSVSRLVTILFPELEKLVPSLHIASVYALLSEYPGAKQISEIHLTKLTNLLATASKGRYGKDKAIQIRDAARTSIGSVMPAKFLELKHTIKLIRELTSEIDEIEVSIQKIMDELNPPILSIPGVGIQSAAMILAEIGDFSNFESPDKILAYAGCSPSTYQSGKLTNCYAHMEKRGSRYLRYALYNATKYVCHWNPVFAEYLAKKRAEGKHYNVALSHATKKLVRLIYALQKSGKAYLVAARHEVTRDFLADNLMNLEKLPKTSMFKEVADIKTSDQLHLPVPEAKFETVVAKPSEIQKEMVQELSKRAAMIHSGAVDASVDNMLCVTNDGRKIGLDVRLMNPMLPDDPNSKLNVCVQNVLKIWDEGKDQKLTQLLFCDLSTPKNDGNFNVYDDIRKKLISAGVPENEIEFIHNADTEAKKAALFSKVRSGDVRVLLGSTAKMGAGTNVQSRLVAVHHLDVGWKPSDMTQRNGRIIRQGNMNKEVKVFNYVTEGTFDSYLFQTLENKQRFISQIMTSKSPVRSCEDVDEQALSYAEIKALCAGNPLIKEKMDLDVQVAKLKVLKADHQSQKFRLQDKLLTKFPADIQETNAYIAGVKSDAELAAAHPQVQEGFCGMTIKGVTYDEKKTAGERLVLACSELPNAEEKVIGSYRGFELSLRFDTFRSEYQAILKGQRRYPVALGTDPLGNIIRLDNSLNNFPERINSAENELATLHQQQAAAQIEVEKPFPQEEELAEKSARLAELNAQLDVDEKSHDPEQDEEEQEDAPRRPSVLAALEEKSDKPEPVKPFRSYYDKDGDARMKEKRDEIIILRTTKAEKSRIYEKMLGMGIRSLSAYIRKMALDGYCLNLDLPQLRRMAYLLQMCSNNLNQYAKRANESGKIYATDMEDLRQRLDELIDIGRQILSKLAELMRFVFKMIVFPFWLITAFLALMLKWTLNLSAFVLALPMLYIFGCGLYTLYCREWMQFLILLVAEFGCFLLITAGTVIVESVEWFSGWIAELMVELAATRLIALHKNKGKSVAACLKSRTDYAQNPDKTNKGELVSSYECSPLTVDEEFMLSKRQYELMTGRRQKNDVIAYQIRQSFKPGEITAEEANKVGYELAMRFTKGKYAFIVATHTDREHIHNHIIYNSTALDSTRKFRDFLLSGLAVQRLSDLICLEHQLSVIEIKPYRERQKRTLYPPKESNRDKLCSVIDGILLDEKTANFEAFLQKLEQQGYEIKRGKHTSVKGARQKRFIRFRTLGAGYSEDEIKAVIAGEAEHRPHQKQPPKEQPFHLLVDIQAKLSEGKSEGYARWAKRYNLKEMSKTLIFLQENRIGSIEEMQERVDATTASYHELGDSIKASEKRLAEIAVLKAHIINYAKTRPVYDAYRNSGYSKKFLEAHREQITLHKAAKAAFDETSLKKLPKVKELDAEYAALLSQKKATYPAYRKARDEMQELKKAQKNVDLFFAEEKDPKEKSQTRMPRPKGSKNKPKTVKATVDFAAQLAEKQSAKEVAAAEIASITANIDALKADLKTKKAELKSIDKEIARIEAKKIKAETKAAESAKKAEAEDVLKKLLASGMSADDILAKLKMKEQNGKLSRDEFISFVKAVLKKKSLEENKPLYFEYRVSGNSKLAESARRFDAFAPDGFFRYQEPVIFEFIDSKSKQLEKRIQTIADDYRKNYEAETIFIVNARTSAEELDLTVWDINEINKWIKEYPAEYGHVCSWNIDRKRTTQDKEKFQISENLYRDDLYQKNNDIYTNAIRTCIEEKKGVAIVLGAGVSKEQGAKTWDELLREFQTEIERQHLLDDSEAVFQEVGGTSLTTAQLCKDVWADEKTFAWQIHQSLYDKARELDVNTELGEIAQLAQKCRKDQNFRILTYNYDDFLEQYLEWRGVKCCSMFTTKVRYSNGQASADFYGVNGQPNQSLRLYHVHGFLPKVATKSQLDTLHIRSICLTEADYNMLYNQPYSWPIASQLSFFRENICLFIGCSLSDPNIRRLLEITAYNPPKHYAILPRMYKSTDASGAVVPKQFTTKDRLQIENHFYRIGINILWVRDYSAIPEWLHNLNRSIVMGKYFGTDGFRGEAGIDLTADHAYKVGRFLGWYYNALRERNGNNEPARIVIGKDTRRSSYMFEYSLVAGLTASGADAYLLHVTTTPSVAYIARVDDFDCGIMISASHNPYYDNGIKLIDCYGEKMPEETLLLVEDYIDGKLHVFDKEWPELPFAHREHIGCTVDYVAGRNRYMGYLISLGIYSFKGVKVGLDCANGASWNIAKSVFDALGADTYVINNKPNGLNINNNAGSTHIEGLQKFVVENGLDVGFAFDGDADRCLCVDEKGNVVTGDHILYIYGCYMKEHGELMNNTVVTTVMSNFGLYKAFDEQGIGYAKTAVGDKYVYEYMAKNGCRIGGEQSGHIIFSKYASTGDGILTSLKMMEVMLAKKMPMSKLAEPLKIYPQVLENVRVTDKKAAQNDPAVQEAVKAVAEALGDTGRILVRESGTEPVVRVMVEAPDHDTCQKYVSQVVEVIKNKGYGVMRILDAVKTYDVSNVGYAKVCNADLLLATDPDCDRVGIAVKNKAVEYELLTGNQTGMLLDYNCSQRVKHGKMPVDPVMVKTIVTMDMGEQIGKLEKQGKKDSYEESCGYLTGSYVRNKDGVDGAYMICEMFSYYATKGISLLDELYKAYGYCLNNLHNYEFDGSAGFAKMQNIMQAFRGAIKVFGGKKVVKLLDYAPGLDGLPKSDVLKSLLEDNGSLVVRSSDTESKLKNYISVSAENKEAAEKVETRQKSLKRQKNGLINTATEMRHDDISVVICCAGMGTRLGIGTTKALVKIAGKSIIQRQLEMLDEYDDIRVAVGYQAEKVIKEVKHIRKDVMFAFNNDYRKTGSGVSLSKTLIGARKYVVIMDGDLLINRDDFNRFMSEPQECISVCEAHSSEPIYLAVSNNEVNEFLRSPSKYEWGCLSKVLSSRLIAGAQGIDEMLQPLLPLKAVPMRIRDLDTQDDYERMIQWYNTGMMDMSEYIFLFDLDSTITRKEILPTIAEKVNRQKEMRELTEATMNGEIPFKSSFLKRVEILSVMNVSETRAMVAEIPLNENIAQFIRENRDRCYVVTGNLDIWINDLMRKLGLNDHVYCSRANYKNDKITQVVSVIDKELTAKQFVQPLVVIGDGDNDSGMAQVANISVGFGGIRDIAPSLIQNIDYAFYDDNRCADFLRTLLMQALILADREIIGLTGLGNSNEPWMVEIDGVPIIERMLTQLDNSIVSRIILITRDNKESLIEFSKRLNLKTELVFLENKFYKESKSIYSIFLGREYLSMDDTVILNSQLVLEDNLLESILETDGECVVSVDIYKNWMTGKPVFVDGNDRVLSVGQEPQMASTLQLNSYRMVGICKFDMNFTKKYFVPVLETIIDVQGDSLEYSEPLNVIAMSNDTRIKALRVSNAVWREINNTEDINQATILFSKDKKSVADKMLGSWGGYWRYPDYLDYFYLVTPYYPPRELVEELQNNFKVLLEQYPSGMRVNAELAASAFGVSPESIIVGNGAAELIKSMMGFIKGKTGFVRPTFDEYPNRYTEIETVNYLVESEDFSYSASDLIEYFDKTTISNLVLVNPDNPSGNYIPKNDMLRMISWARDKGIKIIIDESFVDFSDEINASLIDQEILNQYPNLYVIKSISKSYGVPGLRLGVLASGDKRLISKMKVDVSIWNINSFAEFYMQICGKYRDSYIKSLDKFRKERTRFISKLQNLRYIRVIPSQANYLMVELLDGLDAEELKQKMLLEKKVFIKTLSKKIKGKKQYLRIAIRNEADNDMFIQKLTETLNEMLSSENRIKKDVMEHNFTWKNDGRTKVMIGCGTRPEIIRLAAVIKRCREYFDCCVVYYNQNWDRNLSTVFWEDFELKNTFGEYGPDILVPVVGENLGVTCGNILGRSYELLSELQPEGYLVLGDTNSCLSAISAKRLHIPLFHMEAGNRCKDECLPEETNRRIVDVISDVNMCYSEFARKYLADTGLPKERTYQTGSPMAEVLHMNLEKIQKSDVLERLGLEKDKYILLSAHREENIDSEKNFLSLFTAINALAEKYDMPILYSCHPRSKHRLEQSGFQLDPRVRVNEPLGFNDYNKLQMNALAIVSDSGTLPEESSFYLSIGHPIAAVCIRTSTERPEALEAGDFILAGITTRELLNATDMAIEMKKKGVLGKPCPDYVDETVSMKVVRIIQGYVNVVNKMVWRKYGAKGMVGTALCNNLKNIRDGKNKTRPALNIEEIYEYDLNSTPEELDGYCRKADFVFNLAGVNRPENPEDFMKGNFGFASDLLNCLKKHNNKATIMLSSSIQATLAGRFGNSEYGRSKKAGEELFFQYAQETGAKVAVYRFVNLMGHSRPKYNSAVSTFCWAVANDEPFTVNDRSTELELLYIDDLVEGMFDLLEGKEQHCEFDGVETVLKADGRYCCVPVTHKVTLGEIVDLLQEFKTQPTTLMMPKMPDGSFAKKLYSLYLTYLPTDKFKYALKMNVDNRGSFTELVHTADCGQVSINISRPGITKGQHWHNSKWELFIVVAGHGLIQERNINTGETVEFEVSGDKIEAVHMIPGWTHNIINLSETENLVTVMTCNEIFNPNHPDTFFEPVLDTDDLKQAGNLGLWKAVPKFDAARGMKFLTYAAPAIRNAMMDMVRDAFATFEQRMVTEDKMTAVIYARYSSDSQREASIEGQLRDCKDYAEKNGITVVGTYIDRAYSAKTDDRPDFQRMIKDSGKKIFDVVLVWKLDRFARNRFDAVNYKYQLEKNGVHLVSVMEPISQGPEGIMVESMLIGMAEYYSAELALKVARGERENALQCKYNGGVVPLGFTIGKEDRLYHIDPETAPIVQEIFTRYADGEPAEKIAASLNERGLRTRTGKPFVKNSFFQIFRNRRYIGEYRYKDIVTPGGIPAIVDQDLFDRVQQRFEQNRIAHGRPAKEDVSYLLTTKLFCGKCGTMNEREKIIRLWFDMWIKKADLGIDNIFTDDVVYTESWSPKYENRKTVKHWFDEWNTRGSVLVWEIKQFFHQGNQTIVEWYFKSKMNNGNVEEFDGISLIVWTQDNKIKSLKEFGCNLHNYNPYRDSDIPVFREEKANWFMRVLGIDPGYAIVGWGVVEYAGNRFAPVDFSAVCTDAGVPFERRLDEVYTGIKEVIERTKPEVLAIEKLFYQHNQTTVIGVAEARGVILLAAAQAGLPIYEYTPMQVKQAVTGYGKAVKKQVQEMTRVLLHLPAVPKPDDTADALAMAITFCHTNGNQLNRYTRRVAGPIMIYCLTGKIVKKSLNAVVLSCGGVGYYTQCPASVAGALPGVGQETTLYTVMSVTENDVSLYGFATEEQQACFEMLTAVSGVGPKVGLAILSVMEPQRVALAISAGDHKAFKAASGVGPKLAQRIVLELKDKVAKGFVDGISLEDVAGTAADTPATQSSAQAIAALVSLGYSQSEAALAIAKIDATLPVEEIIKLALRSMAGRRMQDDTALYGAKMMQPVMTPADNEENNLRPQHLEDYIGQEKAKQNLKIYLEAAKRRGEPVDHILLYGPPGLGKTTLAGIIANEMGVQIRITSGPAIEKPGDLAALLTNLQEGDVLFIDEIHRLSRQVEEVLYPALEDYALDIMIGKGPSAQSIRINLPRFTLVGATTRAGQITGPLRDRFGVLLKLELYSPDELSRIIMRSAGILDQPITPEGAYELAKCSRGTPRVANRFLKRIRDFATVLGDGIIDRDVALLGLKRMDVDALGLDELDRSLLRAIIEMYNGGPVGLETLAAALGEEAVTLEDLCEPYLMQMGFLTRTPRGRCATRLAYEHLGMKAPETGSAEENGQQSLFMRPADTWKDYELLDATDGNRLERWGETLLIRPDPQVVWKTPKQSPLWAKADAIYHRSNQGGGEWEYRRRLPEKWKISCGEGEDKLTLIVSPTGFKHTGVFPEQAVNWAWYQQKIRAANRPVKVLNLFGYTGGATLACAAAGATVCHVDASKGIVAWGKDNAVASGLTDKPIRWLVDDCAKFVAREKRRGNTYDGIIMDPPSYGRGPGGEIWKLEDCIYDLISQCEEVLSDTPLFFAVNSYTTGLSPAVMEYMLKTTLVPRFGGKTSCDEIGLPVSATGGVVPCGATAIWEEMSETILTAENLKFRYDAEQPVYALDGVSAQVKRGEFVAVLGANGCGKSTLAKHFNAILLPESGKVYVEGMDTADEEKLYDIRQTVGMVFQNPDNQIVATVVEEDVAFALENLGVPQDEMRRRVDDSMKMAGIYEYRERAPHNLSGGQKQRVAIAGVVAMRPDCLILDEATAMLDPRGREQVMQTIHYLNRNMGITVVSITHYMEEAAQADRVLVMSKGHVVMEGTPKEVFSQTEKVRSLHLDVPQAAELRDELVKAGIPMPEGIIDTGACAQALYELLQMADIIKVEHLSYVYNPGLPTAVTALDDVSFTVEEGDFVGIIGATGSGKSTLITHMNGLNKPTSGKIYIDGRDLWADPEKIRDFRFLTGLVFQYPEYQLFEENCYKDIAFGPKNMGLDEAEVDRRVHEAADFVGLDPALLERSPFELSGGQKRRVAVAGVMAMKPRILVLDEPAAGLDPEGRDDILSEVKEYHKKTGTTVLLVSHSMEDIAKYANRVLVMSNKKIAMYDTVEKVFARAPELLELGLSVPQVTKIFLKLREMGVDVPADVYTIPYAVKTLLEAKRRRDAGESLVLPRSAARKGGAVMLRDITIGQHFPGNSLVHRFDPRLKLVLTVAYIVLLFAASNPLGLTLSILFLGVMYKVAKIPVKMIGKSLKPILPIVLFTAVLNLFFVSGEGDPLVHFWFLTIYAEGVRYAVLMAVRVMALIAGTSLLTYTTSPIVLTDAIEQLLKPLGKLHFPVHELAMMMSIALRFIPTLIEETDKIMNAQKARGAQLDTGKMTDRVKALVPVLIPLFISAFRRADELAMAMECRCYRGGTGRTRLKVLRCEKQDYIDLAVCIACFAVILASRLVFPNYMNFLLTLAYDGTNYCGFQVQPNRRSVAATFQDALEAVLGSRPDIKGCSRTDAGVHALGFRLNFHADTRIPPQKLPLALNQHLPPDIRVLAAQTVPEDFHARYAAHTKTYLYRIHNNPIDSPFDAAYYTRVPRRLDEAAMQAAAQQFVGTHDFLALCAAGSSAAAHGDTVRTITDCHVTRRGDEVDIEVTADGYLYNMVRILAGTLCEVGAGRLRAADIPAILASRDRSRAGPTLPAKGLFLKCVDYPERKEEQPMKKLHRGGSNPDGEPLSAGRVEYLEAARQRVRRRRLRRTAIILAALILVTLFATGAVGASIARVKDMVDTVHIALSPAVGWPQQTGLGELTAVQPMSGSFVAMDEDACAVYSLGGTRLASIQSGYARPALAAGKTRFVLYNRSGNELRVESRTQNLYSKTLENSIYLCAMSDTGTLAVATDSADSTARLTVYTSTMSEQLHWDMTGTQGTPVRMAFAADSRRLAVAAVTSSAGQLQANLFVLNLAQGDPVQLSSGDSVPQWLGWLNNDTVLAVYENCAVVYGADGGERGRFDLGGGSLVSVSQDGANAALLLENGQVCTAVLLDKDLNVQYSGNVPAATQILRRGQNFYLLTDSGVECFAADGVYQWGQELSVRPQALIAGKQLLVLCGNTVQQIAPPEQTASSARMFKNPSFLFDILCTVVWLVLMVRYARKGFLASIVQLSGNLISLLGARQLSAACAGWVFENLLAGGFRTQIAAHLSEDGVVNLSGIAQQYAGFLPESFRASIVAACERSINAVLADNAVVLADTIVEKVLQPLLTPVIMLVLFFVFYAVLRLLVSMLVTVLGLVNKLPVIGTVNRGLGWLTGGMTALLDLYLVLCVVWGLVVITGGNLNVLNDTVMHSSLYYKAFNMFNPFLMVCIRCQKRPAIIFIQRMENGQMKQEGYCLHCARELHIKPVDDLMKQFGMSEQDLDNMENRMESMMEELGDSNPLSMLMNMSGSGEDADAENMDEDLVPGSNATFPLGFTGTEKQDGEKKADRKNGKKPPKRKFLDTYCENLTRKAREGKLDDIIGRDREIYRTIQILSRRQKNNPCLIGEAGVGKTAIAEGIAERIAKGQVPIGLRDKEIFLLDLTSLVAGTQFRGQFEQRVKGLLSEVKAAGNVILFIDEIHTITSAGESEGAMNAGNILKPALSRGEIQVIGATTFTEYRKYIEKDQALERRFQPVRVEEPSVADTLAVMNGIKRYYEQYHHVQVPAEVLSAVVTLSERYITDRFLPDKAIDLLDEACACCNLAHPVISEYLGMQKELDALKQEEAEMESADVNEAIDYERVAERKTRIAKLESELPAKQAAASEIQVTMDDVAKVIELWTGIPAVKIRETEFVKLAGLENALKQKVIGQDEAVHLVAQAIKRSRADLSGRRRPASFIFVGPTGVGKTELVKQLAEQLFDGPDPLIRLDMSEYMEKYAVSRMIGSPPGYVGYEEAGQLTEKVRRRPYSVVLFDEIEKAHPDVMNILLQILDEGKINDAQGRTVDFSNTVICMTSNAGSSDQSAGSLGFNKSDAQRSEEKTRKALAQFLRPEFLGRVDEVIAFKPLTEETLQGIAALMLDEYKPGMEAKGIAYSYTPAALKALVQKSQGGRFGARDLRRTIRKAVEDPAAERLIDGTLASGGTLVVDADENGEIVLKMPKNLKLKAARAEKDMTQGALAEAAGVSRQTINAIEKGEYNPTINLCRSICKILDKTLDELFWEEMKFSLYSKKNQLDEMQEQTMRKIESHGFWLLWGSLLAAWIVQTVFGAADKAAGEWVVFMIGCIYTGVACLRNGLWDRHFSDTPPANAVWSLVAAVAVTLICGFSRGYWVGAVFAGVFTGILCFALLQLCAALTRKRREHLDDPKDGEMPSNKIRTRFAPSPTGYMHVGNLRTALYTYLMAKHEDGTFILRIEDTDQGRYVEGAVDVIYNTLRETGLLWDEGPDIGGPVGPYVQSERMGMFKQYAEQLVAEGKAYYCFCTEERLEALHAEQRAAGEMTHYDGCCRELPKEEVEKRLAAGEPYVIRQKIPREGVTGFDDVVYGHIEVNNSEMDDQILIKTDGMPTYNFANVVDDHLMGITHVIRGSEYLSSTPKYNLLYQAFGWDIPTYIHCPPVMKDAQNKLSKRNGDASYQDLVAKGYLTEAVLNYICLLGWSPRGEYAEQEIFSLPELVKIWSPEGISKSPAIFDPLKLRAINAEYIRRLSPEEFQKKAEPWIDSAVHSAIDKKLLCANLQPRCEVLGEIPEQLDFFDAMPEYDVSLYANKKQKTTPETAKEALEALLPVLSDEALDFANRDAVFDACKAKAEELGKKNGWLLYPLGIALSGKQRTPGGGTDLACMMGREKTLQRVQDAIAKLNGMTERMGVLSSDGRCLQPSPLAARAMLRPAARRLAAVGIGFAGGWAVLYGALMPFGLGLTLGLAEDCFAPCAAGAALGLLLHGLGALSLRSLCQLCALGAAVAARWLLPQKFVPAALAGCGTLTGMALCFALGSSGADLLLYSAADALLAAAIGFGLRKFAPERPGMGTLLVGTAVAAALGSVRWGWFSPGVLACAAAELALCCRAQKFAALSGSAVLGAALCAADPALATAAAGLGCATAAAAVLAPGRRVETLAAYAGGCVSGVLCVQPPGNAFGLLFSACGGMAVVCLLPGGWLVPVADTPQSGENAPAPARSAAASTRLEAVAQSLSSLAETVNAVYEGLPRRREGFRWVIDNVHDTLCFNCGRRETCWKQEYTATMAGMEALRPLLEQNGSVETAQLPGELSRCIHPAALCAAAGRSFALYRSRKEARIHSEAMRTALTEQYSAVAEALGVLSEQLGRPGDPEPYKSSRVAEFFTGLGAPPQECAVTLDDLGRTHAAVTLPRTRFTPQELAALAGEVGHICRRTLEVPQVLSCKGMTTLLFSERPALRAVFGAASAAARGEVSGDAVQQFCSPTAAQMILCDGMGTGRPAAVDGNLAAELTARLLKAGFTAELAARLVNVALALKSEDESGATLDLISVDLYTGTARLFKAGAAPGFLVHGGRVRAVGEATLPMGVLGGVNGQSRVVHLTAGDYAVLVSDGLLVDGAGWVAKQVELSAAAGDAPEKLAETLVQTARIRAQKTGRPDDITAAVLRLEKSGMLTINVAPDGSGQFTTISEAVLAVPYDCPAVIRIAPGIYREKLVCEKKDITLAGAGMDATRLVWNDGGKLPHPDGRPTHTFRSYTAFFSGEKLRVEDMTIENDAGPGAKAGQAIAAYVDSARAAFDRVRLLGNQDTLFCAPLPEKEREKDGFLGPRGLAPRRASAQYYHACEIAGDIDFIFGGADALFEHCTLRTVDNGLAHSWVTAPSGAAQGLGFVFWDCDFVSDCPAGSVYLGRPWRPTGKTAVLDCRLGSHIAPEGFAGWNDRTDTALAGFAEAGSTGAGAGERPGWVQALSAAEAAALLRTARQKCRMETTERITEMKKLPNAVKWLIILVVLGAMGAMMWAVNDRASRVEMPAPDNTFGIYHTAESGTMRQTTKARHTLGIRGQLMWFLCFICLFLLGLFWLLSTQLLEPLYTKHIETQLTNQADSIVERLDDAIAEGKVLSSWSFGQLAVNSDFFDKLTLELYTKGSLNSFCVDISDTTLHTIYKIENQSFCNLHGTYLSDSANNDKIIATALAMRRKCRSVGSFVQTLNPPRLSGSAQLLVGRITADGSYTVLVTTSLVHVTEAGKVLSTLLPLAAALIFGFAMSAAWLFSEWFTKPLRQLSSAARQMALGNYAVQVDNRRNDELGDLARDFNHMAEEVQHAVQMQRDLLANVSHDLRTPLTLIKGYAETVRDLTGDDKAHRDEQMNIIVDEADRLTALVSSVMELSKVTSGTYKCERVHFDMGQLCDEVSERYDAICAQNGWQLQLELPEEELPVYADPDMMQRALHNLLGNAMHHIGQDGIFILRAFRCSEGVRVEVEDHGPGIAAADLPYIFDRYYRSRSDAGKQGTGLGLSITKAIFQQHSFRFGVQSTVGKGTTFWFVMSDLPYVDDFEGKMAKILIVDDEPRIRELIHEHLQYSGYICEEAGDGSAALAQLSGGGFDLVILDLMMPFMDGMTCLREMRARHINTPVIILTARGEEYDKLAGLESGADDYVVKPFSPRELVARVRAVLNRTMPRPTEAADTMTFGELTIDTASHTVRVSGEEVALTPKEFDLLVFLASNKGIALSREKILQKVWNYDYFGEDRTVDTHVKMLRGHLGKCRSYIATVWGIGYKFDPDAARMSIPKIIHYCWFGGGPISPESRKCIESWKKYCPDYKIIEWNEQNFEISQNRYAQQAYEAKKYAFVSDYVRLAVLYRYGGIYLDTDVELVRPLDELLEHKGFIGMEHSAPSPYGRTLLVNTGSGVGAEPGCEMIGKMLAGYRNASFLQETGEPDLRTCTQRDTPLFTKAGLQQKNEQQELDGFLVLPTDCFSPFDYVTERMHRTPRTFGIHYYQGSWQSGDKANRWRKRFKCTKVGRWCMWLRQCSPRWLREKRRSLHNRCRLQWKKWFGCRGLQFGRCILLDKELKLQLNSGSRVTLGDRVESDGRVFITTGYSSQLNIGSGVYFNDDAVISCLGKIDIGENTLFGPGVKIFDNNHRFSREEGVSRVCDAGCITVGRSCWIASDVVLLKGTDIGDNCVIGAGCVIRGAVPAGSLVTRSGEQTTRPIETRMRIGLIEFLLILAIASLTVGPRVALFVDRWMRRANRANAMAARRRAEYAAQMAAERDAMLKRFRTASTVFGVGILLVLVYALGFRPIDTPPQAYKAPDLRQETGAMQTAVSTDRKTQLELGEYQGVDCIRAKDGLLYAAAWNGAALKKRTSDLVRTDGGHAAAILSVEGELTGFAFDAAGDVWLTQLTTAGGILCRAKHDSWGAAVEQVVTQLDGAPLGVVSAVEVSPAGKVYFAVAAAAGAENGLESALRTELLAHTATGCVYVYDPAARTVEKVLGGVAGAAGLALSPDGSTLYVSDLGSRCIWAVDAAARELTAGGRGCTAAFAGLPGYPGALAADTDGTLYISYRWARSGWLEKNADSTLLRGIALRAGQNTQERLFRCTADAPCAEAVSLATGAWEQTFTGFAQDSCAAVCPVESKVYFGAAGADSLLAANRMTEAFAKQIEAEARQAMTELVAAAKLKKGDVLVVGCSSSEMVGGHIGKDSSIEAARALYAGAAPVLAEKGIWLAAQCCEHLNRALILEREAAEKYGWEEVCVVPRPHAGGSWATTCWKNFKDPVAVEEIRANAGMDIGGTLIGMHLKRVAVPVRLSLNKIGEANILCAYTRPKLIGGERARYTEEDMAEKTLEEMRQAVAEIREKMAAAAREAGRDPAAVQLCAACKTRTAQTIAASAALSIDVFGENHVQELCANYDAGAYCGKPSHFIGHLQTNKIKKVLGRASLIQSVDSEHLLLAIEKEAAKAGIVQDILLEVNIGGEESKTGAAPELLWPLLDTAAAQEHIRVKGLMAIPPVNDDDAQNRRYLAQVYQLFVRAGERGYRNVEMQTLSMGMSGDFENAIREGATLVRIGTAIYGARDYSKKMPKTKTNDPGAHHASSGALIRRFLPYLANYKMVLCLDLFCAALTTLCDIVLPKIMSTITNSAMGVGITLTAGIVLKLAALYFVLRIIDGAASYYMSSIGHIMGVHIETDMRRDAFDHLLQLDHTYYNNTKVGTIMGRITNDLFDVTEFAHHCPEEFFIAGIKIVASFVILCRASIPLTLAVFACVPLMGVVSVYLNGRLRARFRQQRVQIGELNSTIEDSLLGQGVVKAFAAEDEEREKFAKGNRAFEQIKTLGYYAMGAFNTSTRLFDGLMYLVVILAGGLSLVYGKITAGDLVAYMLYVTTLIATIRRIVEFAEQFQRGMTGIERFAEIMDTPVAIKDAPDAVPLQPGPGEIRFEKVCFEYPDDHNKVLHDVSLDIRAGERLALVGASGGGKTTLCNLIPRFYEVTSGRILIDGQDIRRVTLKSLRQDIGIVQQDVYLFSGTVAQNIAYGKPGATRQEIEAAARLAGAEKFILALKDGYDTYVGERGVKLSGGQKQRIAIARVFLKNPPILILDEATSALDNESEILVGQSLEKLAHGRTTLTIAHRLTTIKDYDRILVLGEEGIVEEGTHAQLLEKQGVYYRLWNQLPAEDGEMEEQTMKYGVIDVGGGLRGIYGAGVLDRCLEEDLRFDLCIGVSAGSANMASYLAGQHGRNKPFYDEYSFHREYMSVHNLIRKHSYLDLGYVYGTLSNAGGENPLDYAALARSPAELCVVAANAQNGEAQYFTKADLHPDDYRILMASCCIPVIDQPCVIDGVPYFDGGLADPVPLEWAFAHGCDRVALILTKPIGLVSSDARDKHLAHLLQSHYPAAAEGLRRRAWRYNTAVQRARELERQGLVCIIAPDSTEGMSTLTKNRAGLEKMYAKGKQDAEALVRWMQNTKQDESVGTMTLDYFYGQSGELFSYFRIPKALFHDCRFRQLSTDARTLYGILLDRMSLSVKNGWLDERGRVYIIYTVREVQESLCCAEHKAVKLFRELEDFDLIERKRRGLGRPSLIYVKDFSSGLPKAQVQNCPNGNSGAAESATLEQPKPQANKTDKNKTEWNDPDPICSGGIREQLEDYFYQALEVDLLLRLCPDDEDTIYQIVDLLVDTCSTKRKMLRIAGDDKPAEVVRSRLKKLNADHIRFVLDSLAENTAPVRNMKQYLLAMLYNAPTTMNLYYQNKTNHDFARGSPKAGMRAVHRKRGDVIAKKATIIAVTNQKGGVGKSTTCENLGVGLAMEGKKVLLVDTDPQGSLTISMGWKQPDELPTTLSTLMAKAMNDQPIHPGEGVLHHAEGVDLIPANIELAGLEVALVNSMNREKMLKQVLDSAKREYDFILLDCMPSLGMLTINALAAADAALIPVQAQYLSAKGLEQLLQTVQKVRRQINPKLKIEGILLTMTDSRTNYGKQISNLIRQAYGKHLKVFEQTIPRSVRAAETSAAGKSIFQHDPKGKVAEAYQSLAKEVLADADRQRKLSSERARMPIDSGNLALKGLDDLFSTEENRQEEQREQVQQIPIDELHPFTNHPFKVLDDEAMTRTVESIAQYGVLAPLIARPRPDGNGYEIISGHRRQYAAKLAGLDTLPVIVRQMSDDAAVILMVDSNLQREHILPSERALAYKMKLDAMRRTSGRPSKENVSQIGTQKRSDQIMAEELGESRNQIQRFIRLTNLVPELLDMVDEKKISFNPAVELSYLDESQQRDFLEAMEDTQNAPSLSQAQQLKKMAQQGEFSYEKVFDVMGQEKKSEKDTVTIKNETLRKYFPRSYTPKQMEEKIIQLLDAWQKKQQRRNERMDKLTKKGLDGTQLKTIALVLMVLDHIHYFFEFTGCIPTVFSMLGRLSAPLFLFCTVEGFAHTHDRKRYFIRIWAIGTAMAALEFFMIYAKAFRRGDDFYPLNAIFQDLMLLCIVWQGIDWLREKKFAKGIGAIAAVLCWPYVVVVFLLLFPGVQEMPIASSVVAFVITSPLPMWTGITDGSWSFLLGGVLLYALRGRRKVQLTVWALVIFLCDFALTFGMACRQEGFVWTQMFTDYYEWFEVAAVLLMLLYNGQRGSGHKQLFYWFYPAHVYLLYGASCLVYNVLRMANILAVDDNLELCKLIRTALERDGHRVETRQAGRDLTEPLCRWADCILLDVMMPGEDGFAVCRRIRSLTEVPILFLSARTDEAAVLEGLGIGADDFLSKPFRVAELRARVAAHLRRQSRTPAHRMVRSGVAFDLTARSAAVEGKALPLTRSEYAICEYLALHAGQTFTKEQIYEAVFGIDGTADDTAVTQHIKNIRAKLRAAGVPEPEKLLNTVWGVGYRWKSEDMEKRRLTSLRSVLLQYLVRTALACLLVAVGWLLVLMLWVQNGGLFLPANQAAQACQKAAQDVLPGMTAATFDETQLDSLCRYALFAAPDSSEVLATNMDAGHLQRAMENRQGKTRWHFGYTQYYMTSKLQDGTVCLLQFDYAVPYADPALRGVLPDMQTVHCILGILLLVGAVVWSTHRTGRFLTRETEKLTAAAQAVARKELDSAVFSGAKVREYESTLQALQTMGDALTGSLQKQWAMEQRQREQIIQLSHKLKTPLTIIEGNAELLAEDDGLTAEQKAQIESILQGAEQTRTYLGKIRAEVQTPLRYKRNAEQMSRFIDFTLPSTVPGRTLHGFRCVPEGQVRAVLQLSHGMVEYIDRYRPLAEYLADRGILVTGHDHLGHGASIRTKEDYGYFAEPDGNRAVLADLHAVTVLTKELYPNLPYFLLGHSMGSFYARQYLCEYGRELNGAIIMGTGFQPKALVKVAKTLCRVLAAFHGWHYRSSLVANLSFMGYNKGLEGRTTHDWLNRDQAEVDKYLAEERCTFTFTLNAYYSMFSGILRLHDPAFLARMPKELPLLFLSGDADPVGEQGKGVRRAIQSLKDAGVQNIESIFYPGARHELLVETNKLEVFADIAAWLDKQLAKQMKSTGIVRGIDSLGRIVLPKELRTSMHLDTDTKLEIFVDGDAIVLKKHRPAGSCDFCGEVDEQAIQFGGYCICSACRRKLSALMLICLSLALIAGLLMSRAAKAVRLPAVTAYLLTGLLLGPFFLGRLGLSRFGFGFGSLVAVEGYGILTQVALGFIAFVIGNEFRLSALKHMGRRAVTVGIAQAVITTALVDIALVALHFARPDVISLVAAGEIRPEGRTSARVENQPEAPVELSMGKRIQYTGTTEEKQSSCAFHTSFETKRQKQDEKGRNTSSSAAVSLYDPSREKGIAERPQAFRYPEIMQQKLITFAVPCYNSAAYMRHCIETLLTAGEQAEIILVDDGSVKDDTPAICDEYAAKYPTIVKAIHQENGGHGEGVNQGIRNATGLYYKVVDSDDWLDTDALKKVLERLTTLVARGTAPDLMICNYVYEHVEDGTSHTVRYTNVFPQNRLFDWVHVRRFRPDQNLLMHSVMYRTEVLRECGMVLPKHTFYVDNIFVYQPLPYVKSMYYMDLDLYRYFIGRADQSVNESVMVGRVDQQLRVTRHMIDCQDLDALKDQKRLRAYMVHYLSVMMAVSDIFLLLDGSAEAHAKKAELWQYLKDHVTPGVYRAVRVNLGGLTDLHFPGGDKVVVATYRQLRKIFKFNMSGSMRGGMEICVLIIAFSRLKSYPSRAERALIAHFCAKMENPHSILKKVFGYDSFRPGQEEIVSRLLAGQDVLAVMPTGAGKSICYQVPALLLPGITIVVSPLVSLMKDQVGALVQAGVAAAFLNNSLTDNQKALMLHRAREGWYKIIYVAPERLEMPGFQRFAQERQISMVTVDEAHCISQWGQDFRPSYLRIKAFVDGLPSRPVIGAFTATATAHVREDIRTHLALQAPYEVTTSFDRPNLYFETRRALPSQKPKELLELVLKEGNHAGIVYCSTTRQVDETVQLLQSRSIRAAAYHAKLDADTRRQNQDDFLYDRVQVMVATNAFGMGIDKPNVRFVIHYNMPKDLESYYQEAGRAGRDGQPARCTLLYSGTDVRTIRFFIDKEREADNGLPADVKAEAARKAEERLKYMTFYSTTQHCLRGFLLQYFGEAAPKKCGNCSCCLAAEQEAQLQVEYARRRAAQSADRLEKPRRAKPAAAGSLSEADEKLLNALYAVRKRLAGKQNLPAFMVFNDATLREMAEKKPMSIDELLNISGVGEKKAARYGNAFLRVIEDAVGSREMNYANIKYYDIANGPGVRTSVFVSGCRHHCPGCFNAVAWDFDYGQPFDKTVRNEVFASCQPDYIAGLSLLGGEPFEPENQRELLPFVRNFKALYPAKTVWCYSGYTWEQLTGKEPSPARCEVTDELLALLDVLVDGRFVQAEHDISLRFRGSRNQRLLDVPKSLAAGQPVWWEDEKVFATHTMERMKIIKRNGAEVPFDITKIITAVTKASDSVGGQARLSREQITQIAAAVTDQCQQLNRAVSVEEVQDLVENQLMDIQAHDVARHYITYRYVQSLKRQTNTTDERILSLIECQNEEVKQENANKNPTVNSVQRDYMAGEISKDLTARLLLDPEIVKAHQEGLIHFHDSDYFAQHMHNCDLVNLEDMLQNGTVISGTYIEKPHSFSTACNIATQIIAQVASNQYGGQSISLTHLAPFVDVSRKKIAAEVELEMEGLDVSAERKKEIVERRLRNEINRGVQTIQYQVVTLMTTNGQAPFITVFMYLGEARNPQEKADLAIIIEETIRQRYQGVKNEAGVWITPAFPKLIYVLEEDNIRPGTPYYYLTELAAKCTAKRMVPDYISEKKMLELKVDKNGEGHCYTCMGCRSFLTPYVDPETGKPKYYGRFNQGVVTINLVDVALSSGGNFEKFWKIFDERLDLCHRALQARHKRLLGTPSDAAPILWQYGALARLKKGEKIDKLLFGGYSTISLGYAGLYECVKYMTGKSHTDAGAKPFALSVMQHMNDKCNEWKKAENMDYSLYGTPLESTTYKFAKCLQKRFGIVKGITDKNYITNSYHVHVSEPIDAFTKLKFEADFQRLSPGGAISYVEVPNMQDNLEAVMSVLQFIYDNIMYAELNTKSDYCQVCGYDGEIKIVEDDGKLVWECPKCGNRDQNKLNVARRTCGYIGTQFWNQGRTQEIKDRVLHLMASQAKYHYILRFVAIAKNCGYFSGQNFARKDLTERLAFRRVISAAVYTRLGFALPIMKAKRIVSILLTGSMLLSLLPVSALAATPVFDAPAQTTAKKAAPLVQEADASRSTEEEAATRSSRDLDAENGTADSITIQLNAEGKPESEGDSEHWAYDYATSFSLNLRQGTFTLQPSSEPGAESALQTDLDIYKDAEFNGGTVGKRAHNEGTISNGTFQWEVYNYGTISDGTFQGKLHNYQTISDGTFQGKMYNSGTISGGIFKLTVTAEAIFQPAQIEGGTFEDGMKIYPDAYYPTTITDGLFDGKVFTEAGSLIKPLTISGGLFTKAVDVSNITNLPNLQITGGYFVSKPTVPEGSVSFTSVSDQNGRTFQVRVNGGFSKNGYEALYVPHGMSERQANPITVKTDTALTDCLADGESIMGTDKVRKNNDGSYTIEVYQPESIVLVTEKPAPSTPDEPGDEIDPAFSSGAAALGIVLGTAGLGYVAYINGTSLYLHYALPGGFIPSTRQELANVLWTTAGKPDPVSTALYTDIPADAIEQQKAARWCVEQGLLSDYGATFGPDTTVTNARIIRAWNRLKKLPVTITKMKATGIVRRIDELGRVVIPKEIRRTQRIRRGDPLEIFTTGDGEVIFKKYSPMGEVNTLAAQLAEVLSRQFALTAFVCDRDRILAVSGSGRRELTDRSISQPLEKLMDARKPYQSPGAPEKTLLPCEGAPRVLLCAAPVLAGGDVTGAVGLLTEDRTACPEDAQCKAVAVAAAFLAKQMEEMRFPLYVVSVSGGKLYRQRIFCFARRIAFRAGFCYNKMAHILILGGGAAGLAAALAAAQAAPAARVTVLERNPKVGKKLLATGNGRCNLDNTAIAPEKYFTADPAALRPLLAAVDAAAPLAWFEQLGLYTRTDEAGRVYPYSNQAADVLALLELHLQRHKVQLRTGCTVSTLRQSKGGYAVQFTNAEGGTENLRADAVICAMGGAAGPQFGTDGFGTRFAADCGGQMRPLYPCLTALQCAKPNKSLAGIRAKAAARLLDGDRVLAEEMGEVQFTDYGLSGICIMQLSGLLAPGRSPKHPAVELDLFPAVPETELAALFAARAPLLAEDTAAAFWLGLLHGKLGRALWAAAALPDTAPHALPAGSWQKLAHTAKHWRFEGLAPCGWRQAQTTGGGLALTEVEPTFQFKGCPGLYFVGETLDCAGSCGGFNLHWAFGSGLAAGRNAAKHLCSRKRMSTTAMWLLLAVVVILILFFSVLYKRRFTVHELALTGVMAALSLVAYLFFRIPFYGGSSFHLGNTFTALTALLLDGVSGGLAGAIGLALADILAGDPGYAITTFVLKFIIGITCGAVAHKVFKLRDQDRHSAGYLVKVIVSAGSGLLLNVFTDPFLGYFRNVYIFGQEYTVAQALTKIAGGVTFVNSVASTACAVVLYLALRPALERAKLLSKGEMVHLTTALDPASAVPLYEQLYRSLAAEMRAGTLTAGTRMPGKRRLAAELSVSVNTVDTAYQMLAAEGYLTARERSGFTVQEYLALPQGVQPPAAPSAPVAAHPADTAPPVQFDLSTRGVDPGLFPFRTWARLQKELLYSAPELLTPGDARGDAALRQALAEYLAEYRGVQCDPEQLVVGAGLEYLLGLLAPLLPGPAAVETPGYPRARQVLENNGVPCRCLPVDADGLSLTALSASDAAVCYVTPSHQFPTGVTMPAGRRAELLHWAARAPGRRYIIEDDYDSEFRFDTRPLPSLQGMAGADGPVVYLSTCSRSLAPGIRIAYMVLPRQLLGAWQAKYRLYSGTVGRFEQQTLARFITGGYFTRHLARERTAYKARRDALVAALRTSFAPEELTLAGLHTGLHLLAQLKDPPPDAALRAAARQYGVRCSLLSDYDLTGTAHSAAGTLVLGYGSLPDADCAAAGERLKKLCTAAREASDTVMIHTASLPFCIKGRPLGYALCTKRRQSHETRKTQRLASLLGGAVRRPAGAAAAGERHGAAQPRPAAQQSAAGCKKPERGAHPSAQSRRPVHRAAVRGRRDPGLCAGLPERRTELHPSAGGARRAGSALRGQERPPRGLLRRRRTRPLPGGAGRGVRSAGGYRLSCHRPGGADKACGAVRRSAGGLYRGAHTGAAGAVRQGHRGAGHFCRRCPQLFSGTGCRHFSFAPAQRRRPGGGVGCVFPAGAGAAAHHPAAGSAGGEQQPADQPDRRRPCYTGTHAGIFSHQRRAGGYHRMPERFMRGIEALNCIVWGPVGLGLLFGTGLLLTVRTGGFQLRRWGYWMRHTLGAILTDRSVTAHTAREEQAISQFQSLCTALASTIGTGNLVGVATAILSGGAGAVFWMWVMALLGMMTSYAENVLGIYYRRKDPAGGWRGGPMYYLRDGLGGKPGRVLAVLFAAFCALASFGIGNLSQLNSIAGNLNAAFGVPEAVTGAVLAAVSAVILLGGLKRVAAVAERLVPAMALLYIVGALTVVGVHITAVPAALAAIVKGAFGLRAAGGGIVGYGLSRAVTWGFKRGAFSNEAGLGSSVMVHAASNVKEPVQQGMWGIFEVFADTMVVCTLTALVVLTSGFVDLDTGRIAAGAVGSALVGQAFDAVFGTLGSKLIAVCILLFAYSTTLGWSCYGCKAVEYLFGAGAGAFYRVLFVALMPVGAVMRLDLAWTLSDTFNGLMMLPNLIGVVALSGTVVKITQNYLARKLHGSSAPPLWSAGETIMAAVKTRNTATLMTEGSIVKSLLLFALPLIFGNLLQQMYNTADSIIVGNFVGSNALAAVGSSGSPIYLLIGFSQGLAVGAGVVVSQYLGAGDHKETREAVHTSLAIAVVMGLLLTVGGVACGRALLVAMNTPAEVLADAVTYIRIYFGGVLFSVVYNMTAGILNAAGNSRRSLVYLAWASVTNIVLDFVFIVGLRMGVAGAAIATDLSQLVSCVLSLRFLMKSEDACRVELSAIRLHRKMAGRIIRVGLPTGIQNMVISFSNVLVQASVNSYGAAAMAGFAAYMKIDGFNILPVSSISMAATTFVGQNYGAGRLDRVKRSVWVTLAIGVIYTLCTGAALLAGQDAILHLFTADEAVVTYSKLAMRWFCPFYFLLSILHGLAGAVRGTGASIPPMVVLLVSLCLFRVVWIQFLLPFFSGIEGVFILYPVSWGLGALLMILYAWKGKWMEYHTMNRRDFMKLSAASAVTMGAVAGMAPASFAENAGVHTDAEVQAMVAEELRLSREVAFYPAAFRGDFDKFYVLFHKLSRAQYEKVDGAAVPGINASHYDMCVALTNARKALRQIKDPKSTVWEIWGDQMAVESPLPTNWENCYDNEGFRPFLNPYLLRDQGKVKGNVIIIAGGGSTHRNNVVEGYPVAEFFNKNGYNAFVLQRRVNPYAAVDQQLDLARAIRYIRHNASEKHIGKTDIMIAVGFSAGGMNVMQVVADQFGTTNTPDKVYPSYVCDAVDHESADLNVAIPIYGLFVTGLNFTKNPNLPPVFGVVGQKDGLSAMMLPSLPECANIFTDFSFYLAPDAPHGVGLGTGTKGYVDYYTQIAQWPDMAVNFIESRLGLMEKKIDMDSVGFAWMSQNEAFAPWQCPLCGGALQGENDLKCEKGHCFDHAREGYWHLLPVQSMRTKAPGDSKEMVAARRAFLNAGYYGIFGQALGELCLAHGVPAAKDAPLHLLDAGCGEGWYDRCIAQQFAAAEKPLQLAGFDIAKPAVRLAAKALPAAQYAVASSFSQPVRTGWADVLLNCFSPFAQEEFSRVLRPGGRMIYVVPGAEHLYQMKAVLYEKPYKNPVQQVEYPGFRAIDEREVQGTITVPAAQLEALFAMTPYYWKTPRDGAARLAALPQLTTTIAFRFLVFEKLMTFKELNLSAPLLRAVQEAGYETPSPIQAAAIPPVLAGRDLMGCAQTGTGKTAAFALPMLDRLTANAPRRKGAVRALILTPTRELALQIGESFEAYGKYLKLRSTVIFGGVGQAPQVEALKKGVDILIACPGRLNDLIGQGFIDLSALEIFVLDEADRMLDMGFVHDVKKVIAKLPAQRQNLMFSATMPAEIEQLAAGILHDPAFVKVDPVSSTVDRIQQSLYYVEKGNKKLLLPWLIKNLQPPVVNALVFSRTKHGADKIAKDLTKQGIPAAAIHGNKSQTARVTALEDFKSGKTRVLVATDIAARGIDISELSHVFNYDLPEVPETYVHRIGRTARAGADGTAVSFCAPEEQEYLAGIEKLNRRKIPVVSGHPWDGVPAPVRPVLPVRGKKPRPEAENLAEAPKKQAETAPAKAAKAAAPAPKQEPKAAKNAVPAKPKKEETLMQDSNAKRGARNDRRANNRGANAPKEAAAPRARRENAAPARGSNVQPKFDPHFVSAPEATPLRPARKTPVAPAAPAIRSAQEPQNNQNANRSGSRRNDRNDRGEQRNVRPAAQNNNARPARSERGNAGSQNRTGSAPRAAKAEPARRGRSAAARDEDPGLMLISRRPPQQKYTSFEEYMDAHGGATAPIEDHSEEVMKPTTCFAPAHILLPSEQVPLEQWGCIACDQFTSDRSYWQRAEETAAGAPSTLNLILPEVYLEDGDADARVEKIHATMQDYAQNVLTRAVDGFIYVERTEQSGRVRQGLVGRVDLEAYSYRRGEKCTVRPSECTVESRIPPRMKVRTGAALETPHIMMLADDPDCTLIEPIAAHKDSLPKVYEGELMLGGGHVAGWAVEDPALIAQIENALTVLGSQEEFDKKYPDATRRDPLTLAVGDGNHSLATAKACWEELKKTLTPEQAENHPARWCLAEVCNVHSPAIEIEPIHRVLFNVDCATVLLSLITWSDSNMAGCCFGGSKKQPFTLAGPHMANVLSFEDPTEPLTVGTIDDFISDYIERHPEAKVDYVHDEPAVRALCKQGAVAFLMPPFAKSDLFRGVVMGGVLPRKTFSMGHAEEKRYYIECRKITEMAKYKRQKVKHYHRSFYSREMRVKRGIGIVVLVVAVLAAAWFAAPHVLDWATHTWYTVVKDRDLEAESASRAEAAASSAAASSAAASQAASEPEPEEEKPLDGKAITGGSWAELDVTTLTDEAAIRTAARQLKQQGADYALVTLKDAAGTVYYASGVAAAAQSITENPVDAANIAAILREEGIIPAAQLAAFTDPVSVYTDRSMGVHYDGNSLWLDNVSAAKGGKAWMNPFAASAVQYVGDLIEEVQGMGYEQVVLTGVQFPNIITRKQDFGASGGKSREGRAAQLTADIAAWQTRFAGSVTLWVSYPDALCTAATDAIGTTGTSLGMENLLVTSSTALDADSRAALEQAAADAGVKHVVVHDTAAFRMKEVVSSSAVFFSYALLAIFAQNAVFTRALGVSRMVQLVGDDRTSSALFGMMLCITQVLVAPVAFLAGRFIAPLDNRAQLRPLVYIASIAVVCLAEHLVLWLLRSLPRRAQLLRIVPLAALNSGVLGTVLVERTQSFTLGQSLGFGLGSGLGYVLAVLLVTEARHRLRSKAIPKAFRGLPITLVYIGVLALAIYGFTGHSVILMKKRTADLILKDPEKFAHHDRVFLNNPVVMQGMGLAPLVVVATTGQNSLMLAAAVALLLVPSRVLACLLSRLVPLRDEEPTPEQLQKKLLPRALLYAASAAVVYLAAYPILNFVFGTGLLNLGIYLPMLVVEPLLTYRFGRVQETVHKAVSKGVRITVGYALLLLVVGVVREWLSLGTVFGAPVGRWALLPLAKMPAGGFIVLGILCAIWRAAAAKRKEYLKKEARDTLTVHYQKEGNREPMDEALIQEQERQLQKTGRYYEHVFWLCVPLLCMACYFYGARPLLLCGIALLTGNLCDRLVALLRHRVYTNKDLSNESFSLIIALLMPATVDIYVLVVAVLAGVLIGKEVFGGYGSYPFNPAAVGYAVAAVSWPEQVVRYPQPYTPLPLWNASAVPVSSTIEDTLRSGGILNLNSLAIALGEFAAPMGTGAALVILACGLVLWTQKDVHIGASASFLITCGLIAFFFPRQVGLADSTLFSSLMPRLQGVRDELHTGAMLFCAVFLLNEPYTCAHHRLGRILYGALVGIATMGFRYFGVYETGVCFALLAVNSVSALIDRTEERLYRLLHRLPSERKEAAEMAIVSPSILSADFGKLGADCRMVLDAGAQMLHYDVMDGHFVPNISFGVPVLKSLHKALPDAFYDVHLMISHPLQYAEPFIKAGATLYNFHLECEDDIQATIDAVRALGCKVGLTIKPGTPAEALAPWLDQLDLVLVMSVEPGFGGQKFMPSALDKLRWLKAEREARGLSYLLEVDGGVDAATAPLCVEAGADVLVAGSAVFGAADPAAAVGALTSLMKMRLSHSAECDKRGIKNLFSAEYGQSNAEAIPNRPASKKAAAKWQAFGGSCAAHGDAAAQWTFCAIYDFSVKKTAAGLIFWPFSCKLKDNHARVFFARQNPAKRATHGIKIAKNNGAMRKSISTAFFSMVSTLMVLGIVLMGCSEWVLFKNYFAKDRYETLDQVVNVAKRTAEYLVNSETMPQGAELDALNTKLEIIGESAEAYLFFTDRQGNVLIASDPDKLTTTTVPLDICQRANAVADPDARHYHAFGDLGGALTEKSYIAAVETIDDQSLFSGWLFLCSSGAQLTDFKQQFWSNFLLSACVMLLCASVLTRLLMRQLTDPLQKVTDAAQRFGGGDLSVRVEGVEGDGEVADLARTFNQMAENIQSNDNSRGQFMGNIAHELRTPMTTIKGFVDGILDGTIPPEMQNHYLQLVSEETGRLARLIQNMLDLSKLESGEYQVNARMFNIWETLTGVALAAEQRINDGMIELEGLTMDEKVLVYADPDLIHQVAYNLLDNAIKFTPAGGTIRFSVEKLGPEAEISIWNSGQGISPEALPYVFERFYKEDRSRGLHARGSGLGLNICKVLVNLSGGQIRVESQQGEWCRFVFTLPTCSPNPGGMKRLPDAAGQPGAVEEPASMKPVEMANEKILVVDDDANICELLRLYLTKEGYQVTVANDGEEGLEKFNAVKPDMVLLDVMMPRMDGLEVCRRIRKAGNTPVMMLTAKGETFDKVLGLELGADDYMVKPFDAKEVVARIKAVLRRCQTTSAAAESTEGVIEFDNLRLDMNSYELRVKGKVVEAPPKELELLNCLASHPNRVYTRDQLLDEVWGFEYYGDSRTIDVHVKRLREKLAGASDKWELKTVWGVGYKFEVRQMKLGIVGLPNVGKSTLFNAITSTKNAEAANYPFCTIEPNSGIVAVPDKRLDKLAEIWQTNKKTPAIVEFVDIAGLVKGASQGAGLGNKFLGHIRECDAIVHVVRCFDDDNIIHVVEDVTKAVAVDPIADIEAIDYELILSDLEVVQNRAGRMAKAAKSGNNKGAAAEAAWLQQLADHLSAGKPARSFDFDPADTEQQTVLHEMGLLSAKPVLYACNVGEDDLMEGIENNKYVPLVAARAKEEGARYIPICAKTEEDIADYSPEEKKAFLAEMGIEASGLDNLITASYDLLGLISFLTDGKKECRAWTIRKGTKAPQAAGKIHSDFERGFIRASVIGYDDLEANNFDYAAVKAKGLQRTEGKEYVVQDGDVIEFLFNVMIFGIMGAMPDEVDQLCAKLENVTVEPYGGVEYHKGTLAGKQVVVCCAGMGKANAAATTQVLITKFGAEKIIFSGIAGNMTSKIGIGDVVIGKTVLYHDAQLDMICQNPPFLKEYTGDPELIAAAEAACAEAGVKALVGKIATGDLFVGDSETKAAIEAKCAPDCVEMEGAAVSQIAAKNGVPCVILRAMSDNADEDGHEVLVVKKFSISEYVATATKIVAAMVEKLMNKKQKKTLERILIAVALVIVLKLLPALPMPVELALYCIPYLVVGWDVLRKALKGIKNRQPFDECFLMAVATVGAFALGDYVEGCAVIIFYQIGELFQSVAVGKSRQSIASLMDIRPDYANIEGEDGKLEQVDPDEVEVGTVIVVQPGERVPIDGVIVEGASALNTAALTGESLPRDVNAGDEVISGCVNMTGLLKVRTTKEFGESTVSKILDLVENSSMKKARAENFITRFARVYTPAVCYGALALALLPPVVLLLMGQPARFGDWVYRALTFLVISCPCALVISIPLSFFGGIGGASACGILIKGSTYLEELANTGVVVFDKTGTLTQGTFKVTGIHPVEGVNDAALVEAAALAESWSKHPISLSIKAAYGKPIDAARVTDVQELGGHGVTAKVDGKTVAAGNARLMEKLGLAVPAVDGVGTIVHVAVEGSYAGYLLIADVVKPHSADAIRALKASGVRKTVMLTGDAQPVAQAVAQQLGLDEYHAGLLPGDKVDQIEKLLAEKQPKENLAFVGDGINDAPVLSRADVGIAMGALGSDAAIEAADVVLMDDDPAKIALAMRIARRTLRIVHQNIVFALGIKALCLLLGALGIAGMWAAIFADVGVMVIAVLNATRALYTKDLTKNMTGHTARRKERLVLIMKKTYKIEVDCANCAQKMEDAANTVSGVEKATVSFMTQKMKVEFAEGADPHATMENVLSACKKVEDDCEIFDIMTGLEQTAPEKEKQPVEMPDDEVLYELADLFRVFGDSTRIKILYALHDSELCVQDIADAVQLSQSAVSHQLRVLKDSKLVRFRREGKTVFYALDDDHVRSILSMGMDHIEEMGQRPARRKCRPRHDADAGCRNPEEAEAISNRSAAQPAPHLQIMIITKETDYALRILRVLLDGEMINFVKIVSKKISLYYRPPQPGSASLSIQRKAMFLTIIEAEKAVPWQSAESRKDYAMIKGNVKIDRKNLISILQSCLVLILVILVALMMVEIGNLKGTARVINYAGLVRGDTQRAVKLEITGTRNDELIAYLDDILSNLTSGEGHYELVKLKDAAYQERLDSQRAYWERLKAEVAAARQRGYENTQIVAMSETYFEMADETVSAAEHYSEKIAMKIRTIEILSALDMLCLVILIMLQTAMALKMARKNQLLEQKAYIDIHTGLPNKGSCEELLNNREILREPTACVIFDLNNLKTVNDTRGHSAGDQLILSFARLLRRVIPEKHFVGRYGGDEFMAVIYHTDRQEVEGILDSLRREADAANRDGNQLPLSYAYGWAISADYEGCIMQTLLDKADYCMYENKRAYYATHDRRAPRPMYNWSKRTGKNPAKTLYLEGSYVSLQQWPDQLGGLIEYLMQQETILRKCKAVLDLSSVYEKMVQLCSKEDSRPPLAPAFIVKYLLVSFLYSQPSNRQIGQRTPSPQSMSALSDRLMQVTKGMTITVRYFKEDTAHPEIPAVGNYITLTGKADRIDPVFRTLQVGETVVPFEDLVEISGESIMEIDQYLGITEDMKQQFIGLFHCKCGTSWRRDIGFFERTPDMVFSLERKKVRNKVKQLPTIHHKMARPKGSKNKARTVKASVDYAAVVAEKTAEKEKIESEVATLTANLDDLKTQMKAKKAELKAVTKELTKAENKKAAAEAKAMEEAKKSEAEDVLKKLLASGMSADEIVAKLQNSLMQSIRSAIRGLQRWIADLNEKKQLLLDALEKSKEPTLSDLLVDYFNLRNEQRSDWSGKAKLKCTVRDFEEVKRAVDYLKAHSLNTIEDLNQAIDSLNQTAAPLRGQLNQNENRMRTIAQIRDAAAAHAKQKPIHDTFMKKNFKLTKDAYAAQHKEELDTFNKAVRTLMKLNGSTTVDFSALDAEFSALQSGSAELRTKLETLQPDVSALKNIRKYIDMVLNKQQLSAPGGKMPEKESVLKKLEEAKATQSQKKTEQKNHAQELMTYTQAQIDKANAVDLEKFLRAQGETLVRSGKEYRWKVHDSLTVCGNKWFRHSQSKGGLPVDFVMEFYGKSFPEAVQMLTGEPGEVQPETDPAPSPAFRLPLRNVTNANILNYLTQERKLSPSLVNFFIAAGDIYEDTAHHNVVFVGRDADGHPRYASSRGIQEKFRQDAAGAEKAFGFAHRGTDKQLLVFEAPIDLLSFIELFPKNWQQHNYLSLGGVSGKMTAVIYARYSSDSQREASIEGQLRDCKDYAEKNGITVVGTYIDRAYSAKTDDRPDFQRMIKDSAKKIFDVVLVWKLDRFARNRFDAVNYKYQLEKNGVHLVSAMEPISQGPEGIMVESMLIGMAEYYSAELALKVARGERENALQCKYNGGVVPLGFTIGKEDRLYHIDPETAPIVQEIFSRYADGEPAEKIAASLNERGLRTRTGKPFVKNSFFQIFRNRRYIGEYRYKDIVTPGGIPAIVDKDLFDRVQQRFEQNKIAHGRPAKEDVSYLLTTKLFCGKCGTSYAEIKALCAGDPRIREKMDLDVQVAKLKVLRGDFQNQKYRLEDKLLKTFPEEIQKQKTRIAALQQDSQIAAAHPQDKENFCGMTIKGMVYDDKKAADTENKKAELFSKVRSGQVRVLLGSTAKMGAGTNVQTLLVAVHHLDVGWRPSDMTQRNGRIIRQGNQNKQVYVYNYVTESTFDAYLYQTLENKQKFISQIMTSKSPMRSCDDIDEQALSYAEIKALCAGDPRIREKMDLDVQVAMKQEIIRKLSAAVAMSLVVGVSLAACGGGSSSTAAGVTKTGSAEGFGGAVTATLTVDANGTVTDCKLEGAQETESIGGAALEELSKQVVAANGPAIDGVAGATVTTKAVRKAVAAALGVELAEEAPADSAAVAPAEPAAIVPVEGGIQIGQAYAAAHGTKCFTEAVAVVKDDVILAAYLDDFQFTSTDAGVTAVPNSDSDFAAGYAEGKVLMSKRANADYYSKMMAEKGGSTVALDANFDAIQNFAVGKTISELEDVAAKGAEAVDAVSGATLVDTAGYLSAIVDAAKNAQTTQKEKREEKPKQNQSELKRCQKRYDELSTLIRSLYENLMSGLLPERQYKQLMAQYDSEQAELESQMETMKSEIAEDKSSSADIRHFISLIRKCKNPTEISDSMFNELVDKIVVYEAEGAGNARTQKVDIYFNYVGQVDIAYTEEELAELKAQKGQEEQQRMEKQRKREKAYREKRKAKKIAENGGEIIKTKTCPHCGKEFTPTSNRQLFCSRECWNQARQEQKKADREAERGDYYYRQRTCAVCGHSYWPTHSQQEFCSDECRRINHNKKTLEFYHKKKGNPKPDPEAAPKPKPKEDNAAMTTLKNPLHDSNNGLDYTLVNDYYLPNLTTAAPAEQHPTERWGRLHKKYLQEHHPIRYNQLLLSGELGSYLATLDEQADKQLALIVRQMQDSAVGMKRNQNFDHNHSQKMLSCHYNMDTNRVEDRFADGTTLAIDCIAIEDEYGNTPAQRAELDWLLYNKPLEYAQLVLGGEIEHYLSLGCDHGRLEDMTDFSDAFAKMLNYNALNCLLNNGAITDSSQLKFHLYHLRNTDQNAPYYNIPDSDSYIYVVFEQETGYMVSNCAKLQWELTIARGVSDFDIEHRTIRFLEYQASISHLNLKEYMIFSDGSYIPTFIIFSAIGIIIKYAPAEYPLFHKSFPFHSYYGFRFSLPVDINEKNWPHIKSIGSVLFFVFAALDLIVFVLGILNRSSTLYISCTQHLLLIGVSFSFGGMILAANKHKEGMLSLYLAVLDDQSDEEQFIDAAVDEQAALDALETFAQNWDNKYPKIAKSWRENWTNLSTYFKYPPQVRRLIYTTNTIEGFNRQLRKVTKSKSVFQTDDSLLKMLYLAMMDITKKWTGRRQDWSRIHAQLSIYFADRMPDMPLPQPKTDLAYLRNEKAKAEQKLRSCQHREKILERQMSELNRRERVHRLCTRAGMLESFLICPGELTDNQVMELLKISFRQPEVVLALAKMVHDVHERSNVQNPLEMPIPCPHFKITIVKRSQGQSAVAGAAYQSSERLFSEYDQKTKFYNKKKELVHAEIMLPSHAPPGFADRATLWNAVEAVENQWNSQLARRIVLAFPVEVPKEQYLKMIREFCQEQFVSKGMIADFAIHDKGDGNPHAHILLTLRAMDEHGKWLPKARKVYDLDENGERIQLPSGNWKCHKENTVDWNDQKYAEVWRHSWETITNRYLEAAGRPERVDLRSFERQGIQQIPTVHLGPAAHQMEKRGVETFLGNLNRDIRAANSLMQSIRSAIRGLQRWIADLNEKKQYDLWSQWEPEESESILIAHASIHGNTAHAAKTLKGKLEKKGVQVNICDLTVTDLSYAVASAFYCGKLVLASATYDGELFPPMREFLEHLRTKGFRNRRVGLIEDGSWAPAAARLMRTKLEEMKDIHLYETVVSLRGALNQTMTKSSKKLTAFGIALALAILIGGFLLHPWERTKSELTVTKVDLSDNSIYATAPNQLYGTNDYYLIQGASEYLKGNIQLSQIEEGENIVVVSNGKVLLSDPYQFDTIYSIRLQMAGTAVVVYLSEKKNCDCATSFLEIYVQLYDFEKNCGQMKTQTNAVKPVGDMDNLWLELPWWFIMQSIINKQRPPGNLPAGAAVFRGTLFFLPYFAASTSTPTMNKEKEIETVTLMVRRYCCGVHWTRGEALCPACNALLEYARERRDRCLHGKIAQEERDHAMLFYQYLQNNGEDVTFEAIAKPEWERGDHMAPLKKALEHEMLVTASINAIYAAAYEVRDFRTMQMLDWFIKEQGEEEKNAADLITKMDLFGGDSKGLYMLNSELKARVYTAPSLVLMAAVTELQQHPKAEQVFLEMKREHPSIALGTVYLPPCREQEKTILWRRSIMNANVSLLLNEQINKEFYSAYLYLDFANYYAAVGLDGFENWYRVQAQEERDHAMLFYQYLQNNGEDVTFEAMTSGFTVTASHNLRKSASRQLLEHKPFVLVDREKNIGIIKAKMPSKTEEYLALAQRTANGLTRYWESWTDYLTTASRLYKYPFADQLMIYAQRPDATACASFDIWNNRMNRYVRRGSKGIALLDQSSSVPRLHYVFDVSDTGVRRNSRDPEVWQYNDDLKQPVSEMLAATYGISGERVSQQLADVAGKLVADYWDNNGEDIRAIVDGSLLMDYDEAGVEMQFKSAAAISVTYTLLERCGFEPAGWFDKDDFQAIYNFSTPDSVYALGAAVSDMSREVLRNIERTVKTTIRRRNAERSQYEYEQQERDLLDRRGLPSPEPDPEPAPEAAGQVRQAAPDVSDEPSPGAVPHDASERESVPAPDGGGADGREPDAAEHGATSEAEPGPGQSAEPTDVGAAHEQPESAGRGTGDDGADLQLSFLDAPIPTEAQQIEKIDRAESEKTPSAFVLSQAEIENELRRHGSGFAGGKQRIMALYQTQPDRKLRAKALAKEYGIGGHSHDFLDGSSGFVNHDGKGLEFDHYPDHQKVTLSWTQVEKYIDLMIQSDRYLTDKEKEHYTPPAPVNAEPDTTLTHAKNLIREFCQEEYDSEPDFSDLTKIGIAYTNATDEEIPIQVNVDLVGYRVERYLGEVLIDEHQYESLEDLTETELEALDFSELVSVTDEELEHYHSKAEERPALLPLDAAAEYNALKEQYPDALVGFEQNGYYEFYGEDARKVCELLGGKLLEKETALGTVPVTGFPSNQWVYRAKQLWQRGENVYLAGLNEDGTHYQTKYLRREDYLPLGAIVHMEGRSFRVETVNFDKGSVTLQDVALAEMRIPVFREEPLALVRELYEEQDMMESPLPDYKVGDNVVVELPTRTIEGKVGYVGETDVRIDTSAHGQSWDNEVVNKQQFEEGLRQNEPNSTRPVRTEKTVAVYPAKENNLPFDIVIQTISTESPTVEAEPPAPEPAGNFHITDEHLGEGGAKQKYARNIAAIRTLFQLEQEHRGATAEEQEVLSQYVGWGGLADAFDPDKDNWAKEYAELKGLLSEDEYAAARSSTLNAHYTSPVVIRAIYDAVEKMGFQAGNILEPSMGVGNFFGMLPDTLQDSRLYGVELDSITGRIAKKMYPQADITVAGFETTDRRDFYDLAVGNVPFGQYKVNDKAYNKLGFSIHNYFFAKAIDQVRPGGIVAFVTSRYTMDSKDSTARKHMAERADLLGAIRLPNNAFRANAGTDVVSDIIFLQKRDRPIDHEPDWVQLGKTEDGFAINQYFVDHPEMVLGVLSTESTQYGREELTVAPLEGISLADQLAEAVQHIEGQYTEVEVETPDIADVENEKHILPADPEVKNFSYTVVDGEVFYRENSVMTQVELSDTAKGRVTGMVELRQIVNELIDQQLNDYPDKDIKATQAKLNIAYDAFTAKYGLLNDRKNGRLFEQDSSYYLLCSLENLDEQGQLKSKAAMFTKRTIRPERTVTSVDTPSEALAVSIGEHGKVDLPYMAELLGTPGEYGRITAELSGVIFKDPASDPTDPEAGWQTADEYLSGNVRDKLRMAQLAAESRSEFKGNVDALTKAQPKDLEASEIDVRLGATWLAPSIVQQFMMETFQPPYRIRYNNAITVRYSPYTSEWRISNKSATGFGDIMATETYGTRRANAYKILEDTLNLRDSRVYDTIEEDGKEKRVLNQNMNYGWATVFTLAAWFAGLVIDVNVRVGDLGLRTVLPVIVMGCCVMKYIKGNNKMKTRRFALCLATVFLVAIYINIQRSHTFTLSNDEGTIKTEQIQPLWGTVKVSGDCDTEVVFTDVETGEKYRIGYITQGVTERIKLERGKWYKVAGGGNLTLNPVNIRVEMSDSTLKELWQQVAEKKSCEAKQKELTAQRDTLADRLKKLEKSKLAEQADVDRLEGHSLAAFFYQVIGKMDEKLDKERQEAYAARVKYDAALHDLSSVDADLEQIQNRLERLSDCERQYQAALSEKIKSIKASAHPAAQQVAESESRIAALKVQKRELLEAINAGKTALHTVNEVLETLDNAEGWSTWDVMGGGLMADLAKYEKLDDAQEQIEQLQVELRRFKTELADVEITADLQVTVDSFLKFADFFFDGLFADWAVLDHINQAQSRVENTKGQIKRVLALLKKMREDIDVQIADEKEKQEQLAVETELMNDLFIQGLTIDWNRVRPYNYVRQIPAISGIDTFTFHKPITFFVGENGSGKSTLLEAIAVAYGFNAEGGTKNYSFSTYNSHSELCEAMTISKGYRRPKFGYFLRAESFYNVATKEIDYSDDDHPSKGYHQKSHGESFLAIAQDYMGADGVYIFDEPEAALSPQRQLTLLINIYRCAQEGAQFIIVSHSPILLGMPDAEIFSFDNGTIHPCQYEDTDSYVITKTFVNNRQHFLNQLLNEETMFFGWFNAVFSIVFPLIFFGLMCLFIFTLISNLRTWNKNNHSPRLSIPAAVVAKRTDISHSDTANAGDLSGAHGYRTSTYTSYYVTFQVESGDRMEFEVDGSDYGLLVQGDIGKLSFQGTRYLGFERNMAIFEKTIRNKNFDKLLRKLENEIPDSSWSADLEAGSDFKEGDARCSVRVFERYSMMGGNRLSLTLTMFQNADSPVRLSAITAGGSQAVFFKVNTLGEESFLDDVKELLEEILEEMNFNHEELMLMMLYNTGTRMGLIHELRLMQCYLMPDETALRELSEGVIEKLKLLTDAEFGKLEFPPDMQQKWNQNFDGEPMTDIPQKFLNAGCDVYMVMQLRHDEKILDERFASMRELHRRGKTPDPEHYEVTYYADLPAMWQDVPNNEILEELFQMFNLSRPQDFEGHSLSVSDVIALKRNGEVSVHYVDSIGFKELPGFLDKKPERTSVLQNLKEKCDAPECNPTVCRKARDAHELMEQIKEAVYLINDERYLHLRENGAGVGFATYNKVTGEPLESGQISEKNLPPDGRNAISAARNWYLFELSDDDRKVIQQESVKILENIPQAGIGRRRIWEPETLPKDIRLINSHYDDIYRIPDGGVVQVDYPDGRSFTARLEHLDDYHFDMGGLGNVFHICQFAEVMERNHADFYPEIQTQDEQAAWELGGKGYLAIQSCEDGWDYTLYHSDYSVMDGGQLAAPELTIQEVREEILEAHHMEKGRRLIQDYDAVMDKVAEAEELSADHRPSTLEKLAALASDTSAPKSSARPAPELMETASADSMPEGVERQGIGTPATRAATIEKLVQKGFLERKGTKKTKVLLPTDKGKALITVMPEEIQSPEMTADWETKLLQIERGEMEPETFMTEIKEMISSLVTTTEATKGANALMKNKIIGVCPNCGANVVEREKGWFCENRECRFVLWKDNAFFKRLGKRLDAHVADKLLRDGRVRLKDCKSAKGKTYNATVLLSCEADGRSKFSLEFEGGCMENVKVPENKNLTPDGSFKKKDGRTTYLVSVFFNHDSTETAESKVKRLIIADLKKKCGNYFKSIVLKEPPKKDSVKIIRMSDVELTPVEWLWKPYLPFGKLSVLQGNPGEGKTYFAMHLAAACTNGKLLPNMERMEPFNVIYQTAEDGLGDTVKPRLIEAGADLDRVLVIDDSEVQLTLSDERIEKAIIENNAKLVIIDPIQAYLGADVDMNRANEVRPIFMRLGQVAQRTGCAILLIGHLNKAAGMQSLQRGLGSIDIAAAVRSVMFIGKLKHDPTMRILTHEKSSLAPPGVSLAFSLGDEGGFRWVGEYDITADEMLSGIEPQRETKTQQAKDLICALLAGGKQALSEDIDKAALERGIPGRTVRDAKRELGDALKSKIVEGRKKVFWMEMEKTMTLNLRVNPTVKQQAEDVLKQLGIPMATAIDMYLRQITLTGGIPFSLSLPKAPAALNADTMTDDQLHAALQVGIKEIQNGDTVDAASAFAQFREQHRMKQYDVKISRMALSDMEQIYSYIADRLLEPDTAMGQYNRIAEAIQSLNILPERCALVESEPERTQGLRQMLVDNYSVFYIVGGDAVSVARVLYSASDLVRRLRRMKMTAVIYARYSSDNQREESIEGQIRECTAYAEKNGITVVKHYIDRALSAKTDNRPDFQQMIKDSEKRLFDIVLVWKLDRFARNRYDSAHYEYQLERNHVKLVSATEPISDSPAGIMVKSMLTGMAEYYSAELSEKVVRGMTENVLKGKYNGGTIPIGFKVDEEKFFQVDPLKAPFVVEAFQRYNDGATMKELMNWLNDSGVTTNRNQKFTYNSVQTMLTNKRYIGENHFKDIVMPDSIPAIVDKDLFEEVQLKIKKNSRAPARHKAEDDYLXXXXRNVRRDDVRRVRYGSEQSRSSLLMVVAETMKLIQDDAVIDAIVAEVMELQEQENTTLPLLEKQMREVENGIENMLNAIQAGVLTNSTKSRLEKLEAQQKELEVRIAEEKIARPRLSENQVRFWLTRFRKLDPNVKSHRETLINTFVNAVYLYDEKVLIAFNYKDGTKTITFDEIAAKDAPEGNGSDLGCFAPPRTPVSNGYRSFCFTCLEKGAARVDSNSNSDDRCQRQKQGGAVGAAASRMRVPPKARCSRWEPRPGFLMSLGLYLHIPYCFSKCQYCDFYSHPGELGVPDAYVDALLRELHRFAPDAPLRPDTLYFGGGTPSLLTPAQAERLIRAADPVPGAEITLEANPETVTEESLRGFRAAGVNRISFGVQSARDTQLRTLGRPHSAKQARAAFAAARRAGFENISGDIMLALPHYTQAEFDETLELIEKGGATHISAYLLKIEPDSAFGKHPPEGLPTSDEAADFYLYAVEQLEHHGYRQYEISNFAKPGYEGKHNLIYWDCGDYLGLGPAAHSCMGGKRFCYAPDTAAFLQDAAAPIMDGNCGAEDYLILQLRLRKGLDLDAYKTLYGKQFSTAQLAFVQNCVRAGYATFDGRILALTPAGLIVQNSILAQLLMSYNNYNRGYAEPTMTSADYMTRTYRWMALGLLITFAAAFVTATTPLFYVVNSLYLLFTIAELALVFVLSARVQNMSVGAARGVFLGYALLNGMVLSYYFLAFDLGTLVLAFLATSLYFGLMAVYGTTTHKDLSGWGPKLMMALFALIITGFVGVLFGMGFMGTVLYSGIGLVVFMLLTAYDTQKLSQMYSYYAGDSELAEKASIYGALTLYLDFINIFLYVVRLLGLNSRRRDMSTNFWELLQQHQGDLTKSGRTVAEYLVQHAAEAQYLSISSLARECQVAEATVFRFCRALGFEGYHEMRIALAQANATGVLVNQQEPAPDADTATLCEHASALFMTAINGTQNALSPQAVDQAVALLHSARQVFCMGQGGSMAAAKEICARFACITNKFRAVADSHMQVMAASLMTEQDVVLFVSYSGATRDLMETLRTAKANGAKIILITHYEDSPGAKLADIVLLCGAQESPLDSGSIPIKVAVLYVAEVLVLRYILDDKPGSTEAQERTTEALAVKMLMEEKTLQIVKMLFIFTISKLKVIFRTAGESVPFCNYFDKMKNCISRRSFLKAAGILGAAGALAACGGSSSTSTAASSTASSAASAASTGASIKLWTYPIGGWGNDETVQNLVSSFNAKYPDIKVTVEYLDYTNGDDQVNTAIEGGSAPDLVMEGPERLVANWGAKGVMAPLNDLWTDDAKKDIYASVESACHNEKGDYYEYPLCMTAHCMAVNMTKVKEVGADKYIDTDKHTWSTEGFLNTVDALYKGGYENVAAIYCSGQGGDQGTRAIINNMYGGTFTDAAHTKYTADSAKNIKAIQALYDAKGVNFDPSINGGEEITLFRNGTLQMAFCWNIAQQLNADTAAAGQTISGDEIFPMAFPTESGDPKLCGGIWGFGIFDNGDEAKIKAAKTFIEFIAADPAQVKDSVLASTYFPVRTSVGDIYAGNEVMSEYSKFMGYLGDYYQITPGWTTARTEWWNMLQRVGSGEAVETAVKTFVDNANAAAAAEAMKEPKRSSALVRRETFASYCFLLPSLIFFLGFVIYPMILCVVTSFFDSTMNRADIFVGMANYKTLFADPIFLGALKNTFVIVIVSVPITCIFSLWVSSAIVDLPEWATSLFRCVFYLPVVTGSVAVTVVWKWMYNNYYGIFNYLGKSLGILDKNINWLGDERFALGCIILILLTTSVGQPIVLYVSALGNVDQSIVEAAEVDGATDFQCFWKIKWPAIMPTTLYILVITTINSFQCFALIQLLTSGGPNHKTDTIMYYIYYTAFKQYKYGYGNAMGVVLAVIIAILSAVQFKLGNKDNMRATAAKKQKPLERHPSKLKKMSAYAILAIILISIMAVLFAFPLYWIITGSFKTGAAINATTPEWWPSQWVLTNYQKLFAGKRAPLWQLAVPFGSKFSANGEPVYFSVGPMAPAAIRWMINTVFMAVMSMILTCLTAAMAGYALAKKRFVGRKLLFTLIVCAMALPKQVILIPLLREMSALNLYNTIWAVIFPIVGWPFGVFLMKQFSEGIPTEMLEAARIDGASEARTFVKIVLPMVKPGIGALAIFTFINSWNDYFMQLIMLSSTSNLTISLGIAKLQAENSTDFGLIMAGAALAAVPIIIIFLIFQKYFTKGIAMGAVKGMKDIKKYQGVIPAFYACYDAEGNISVEGVKALTRHLIAKGVKGVYVGGSSGECIYQHVDERKTVLEAVMSEAKGKLTVIAHVGCNNTADSMELARHAESVGVDAIASIPPIYFHLPEYAIAKYWNDMSAAAPNTEFVIYNIPQLAGTALTMSLLNEMLKNPNVVAVKNSSMPTQDIQMFKDAGIAARGKEGFVVFNGPDEQFVSGRVIGADGGIGGTYAVMPELYLAMNAHLEKGEIAKARAIQYEANRIIYKMCSAHGNLYAVQKEILRRMYGLELGSVRAPMPGLIPEDEPIVAEAQAMIEAAIAKLMICDTLQHLGRYRGLHPNLDTAIDYLLTHDLTALPLGRTEVDGDKVFINLMDATLHPDAGYHPEYHKLYADLQVDLTGSEGWGYTNLPGAEIGEFTGDCGFQDSASVVTGALGEGRFVLFFPEELHKPGLVQHGCVSVRKAVVKIRMEEMDKEKLFAQIKGGLIVSCQALEHEPLYTKEGGVMPLMAKAAAMSGAVGIRANTVRDITQIKQVVDLPVIGIIKKDYPGTPMYITVTMKEVDELVACGVDILAVQGTGALRPDGSTSAQFIRAIKAKYPEQLVMADCDNFENAMLCAEAGADFVGTTMRGYTPETTGIDDIDFDFIRKLSAECPAKIIAEGHIHYPEQAVKALEAGAFALVVGGAITRPAEITARFTGAINAAKKMKHYLGIDIGGTAVKLGIVNEAGAVLAKAEESVSFDGYRTPILTTVLKAAQAFLAAQSVPAESLAGIGVSATGQIDSRKGIVAGTCGNLPNYIGAPIKAELEKTFGLPVTVANDANCMTLGEVWVGGAQDYTDVIGVTLGTGVGGGILTGGRLLEGARGLGGELGHYRTHALDGVDCTCGAKGCWERYAATTALVRAAQEENPAWKDGRAIFAAAEAGNETVLALLDAWTDEIAQGLAGMVHIFNPQLILIGGGVSAQQKLLIEPIAEKVKASVMPAFAEGLEIRAAQLHNDAGMVGAVYYFRQTMEKEMKKHILCLGDSNTHGYCADPNDCADHGIRFNEDERWTCRLQKALGEEYLVTEEGLSGRTTVFVDPLHESMDALSVAYALLKSHEVIDLLIIMLGTNDVKERFGANAACIGAGMERLLLKVKSVDCWGGKAPNILVVAPPCIKDGFHDAVMGAGCVEKSRGVAEQLRIVAERQGVHFMDAAECEFNEVDFMHLTCKGHARLAELLTAAVPKLVMAQEIKMSAAGLKAMQEELEYLKTVRRKELAEEIKEARSHGDLSENSEYDEAKNTQGLVENRITELEQTIKNAVIIDESELSVDNVSVGTHVTIRETGEDDAEEYDIVGRTEADAFNGKISDESPVGHALMGKAVGEKVEVLLPTGQTVEYTVLAITHSANMEEQKRNPAAGLSESEQVQVRRQKLADLQAAGNDPFTLTKFPQDAYSADLKEEFKELPNETDSGKLVALAGRMMSKRVMGKASFAHLRDDKGDIQLYVRRDELGDEAYAAFKKLDVGDIIGVKGEVFRTKTGELSVRATELTLLAKSLRPLPEKFHGLTDTEMRYRQRYVDLIANPEVKDTFIKRSRILKEIRAYLDEKGFLEVDTPILTPFEIGASARPFYTHHNTLNMDMVLRIETELYLKRLIVGGMDRVYEVGRIFRNEGMDPKHNPEFTTIELYQAFTDFHGMMDLVEELYKRLALKICGSLVIPYQGKQIDMSHWERLTMVEAVKKYSGVDFNDWQTDADAIAAAKAHNVELPEVPTKGAILAEFFDAFVEDKLIQPTFIYDYPVEISPLAKRKPDDPAFTERFEYFIDCTEYGNAFSELNDPIDQKGRFERQVAERKALEPECKAQVDYDYVNALEYGLPPTGGLGFGVDRLVMLLTDSASIRDVLLFPTMKPIEQMGADLQRAASQSGFMNLQTDKPELSTAEEVNVKNMEAFLMNKLLSCLYNMDTNRVEARFEGGTTLAIDCIAVEDEYGNTPAQRAELDMPSEILNKARAYEAKHGAAISPAERPAYHMTPYVGWLNDPNGFSYYKGKYHQFYQYNPYDVRWAPMHWGHAVSTDLLHWEYLPCALAPDSPADNGPGCFSGSATQMDDGKQLLMYTSVVAEKQPNGEMRDIQTQSIAIGDGLDYEKPACNPVLTQKDLPEGFSKFDFRDPKIWREADGTYSVVTVCLAEDGSGAAALFQSKDGFDWHFVTVLERCNNQYGKMWECPDFFPLDGKQVLMLGPMEMLPKGEFHNGHNVIAFIGNYDEATHTFTKENVQLMDGGIDFYATQTTLAPDGRRIMTAWLQTWSDTEDKPKGCKWFGQTICPRELHIKDGRIVQAPVRELDAVHGKRTFHENVTVQGETSLEGIKGRVADLTVTVQPGEYRSFTLKLAADADHHTSLTYDPYTSQLTLDRSYAGSRADIVHTRSCKVRSQNGALKLRILLDKNSIEVFANDGEQTMTAWIYTPQSADGIAFAADGEATVTVEQFELNLMKKMISRRNFLKVCAVAGSAVALSACGGSKKAAAPDPSNTDQTSFDIVGGQSALSPGYNDNEVLKKLADNVGVKLNYETMSDSLSEQVNIRIAGDQLPDAFMGVGFSNYDIANYGADGTFLDLTPYINAEIMPNLTKILDEHPNIRAAITMSDGCIYGLPAAEQMGTAGIGDDEDYSIFTIPQFSMINKRWLDELGLEVPTTLDELHTALKAFKDNDMSAKVYGNAPGSTIPMSTGFDEWCWGQNIFYAGFGFTNWPNDVCNDLVLQKDGKCRFVCAEDNYRKAITYFHDWYAEGLMDVEMFSQDTNQLLAKGAQGYLGVSTWWYIEELMGDYSKDYVFLPVLDGPDGTHNVTVRTGGGTNSGNLNVTNKCQSPANLLKFFDQWYDGETVMQLQYGPIGVFFTEQDANGKWKSITEEEAKAKYNKGAGELKSTYEVWGPKLILSEYYDKYFYMEDRAIERLTDLKDFWMPFVDDTTTYPIDCVFTSEELDTIDRYRADFENAVSEQEGLWLKDGGPSDDEWSAYLDTLTNSCGMDKLLEVYQNAYDRYKANVMAKNIAASRQKKPGGLSDKVSDIVLVVICAAVMLIVAYPLYYVLVASFSDPYDVYAGKTFLLPSQFTLKGYQAVFADSALFSGFMNSIKYTVIGTIYSVVMIYLVAYPLSVKDLPGRKYISLFFVITMYFGGGLVPTYLIVKETGLLGSMWALFLPGVVAVGNVIIVRNFFENNIPRELLEAAEIDGASKWTVFVKMVIPLSRSIMAVMVVYSMVAYWNDWFTALIYLRADQAPLPLVLRNILIKSSTSASQSSMVAGGFAELNKLTEMIKFASIIVAAAPMLIVYPFVQKYFEKGFMAGAVKGMTQTSPAAARQLDAIPVHRKSLSQRLRENWQLYVMLLIPVVLTIVYKYWPMYGIQIAFRDFKASRGITGSEWVGLYWFERFFTAPNCVRMIKNTVLLSLYSLLWSFPIPIILSLCINQLRFAKFKRVVQTVLYAPHFISTMVICGMIKIFLSPSGGLLNLILGTSVDFLSESAAFRTIYVASGIWQEAGWGTIIYMACLAAVDTSLYEAAKIDGASMFQRILNIDIPELVPMIVLQLIMSVGNLMNVGFEKVLLLQTELNKATSDIIAVYVYEQGIINAKYSYSTAVGLFNTVVNIILLIIVNRIAKKAADVSFVMSFPVKRYTACNTKITRQRFCVNRILRKKCLVSMFSTFCTLAVGCFCAKCIIVRSMAKQNTAPTMKDVAKEAGVSLGTVSKVINGIPVGDEYRKKVEQAIKTLDYHINAYAKGLKNNRTYTVAVILPNLLNPFFSMVAHYINRALVNRGYRMLLCDTEYDYTKEQEMVQMVAQNKVDGIIALTYNPDLKIPPDVRSVSIDRYLSGSTTCVASDNYNGGRLAAQKLVENGCKNLAFLRIGSPLTSETNKRRDGFVAECEAMQLPCTQKILMDDAPLSEFEHFLEENLKDGRLAFDGIFCVTDKLAVAVIKMLRRMGQRVPEDVQVIGYDGLRAFGDQDYYCSTIIQPVEAMAETCVDLVLQDSHANTPSLLCLPVRYAYGGTTKAMTAPEKGRWYWFKNWLHYHWLYLIIAAVALWVGISWLGNALHWGETLPDYQIAYVGKSALPEDTAHAIEAAFAQYGEDLNGDGIVSVKLNQYVSDTEDVENASTYALAAQMQFLADMNAEESYFLLLDDPAHFQLDYQALANWDGTPPGDNDYTAAGKTVPWADCPVLAGYDLGTYQTTVLGTTVTGSSAELVNGLFLGRRAFYEEPKNEKAALAREGAQRLWEILTEGATPMKRNWLCVVALALAAVLCTGCGVKDENLKSDPLVNADGTAPVGKTLVAPAPPEDFTLLDNKDILAANGLYYASWVNGEPQPYENSEGKTVDLYDAQLTLVVQENKTEEKAASAVSGWQELAQQNYDISDTQTLTAAGQEYTVIQFAYQDKSNPYAFGVAAFGQKGTSAIEWELSCQESYTGDALAVLTEFLNGCTYMGLFFPSDPVIHGQRATGLPRYQELLERDWKSFLFADFVTLGLCIPYGLGVGYALLSSSLLVLIPVCVVGGLLVGPAISCMMDALFRSYRDAPRGWWENYCKGMKQNWKASLLPGVVFSLALGIELFFGMVLFSGERLPGIGTMAVFLAGLLILFMLFTAFWPQVVLFEESNLHRLQNAVLFCLKYGKHVLGAAVLQLVWWLLFVLFLPWTGFLVPFLGVWFIWFVCFFLLYNDFNAAYGIEEKISQQFPEQTPHYDEMDILTIGEVLIDLTQTGKDEKGIPQFAANPGGAPANLAVAAARLGAQTAFIGKVGADAFGRYLKEVLEENKVDVSGMAVDADHPTTMAVVSVDATGERDFSFYRSANADVMLCKEDISDEALKAAKIVHFGSVSLTADPSRTATLDAAARAKKLGATITYDPNYRANLWKNKEDAIAQMKAPLPLVDILKVSDEELPLLTGTTDCESGTAQLAQNGIRLIFVTLGANGVFYRFGDKTGHVAGVPCKVGDTNGAGDTFFGAALSKLCKEDLNTLTVDKLEGILAFANKAASITTSRHGAIPAMPTLAEVEGMATKQEFESRFAKHKDELEWLFMELYHNREGLEVLEREMAEAYNARSAELKALDKARSADPEWYKRGNMFGMTMYTDLFAGNLKELAKKLPYLKEQKLTYLHLMPLLQMPHPHNDGGYAVEDFDSVDPALGTNKDLENLTRELRKAGISLCLDFVMNHTASTHRWAMAAKAGDPWFQAYYHLYDDRTIPDQYEQTVPQVFPNTAPGNFTWCEEMHKWVLTTFHDYQWDLNYANPAVFVDMTKSILHLANLGVEVFRIDAVPYIWKQLGTTCRNLPQVHTIVRMLRMVLECVCPAVILKGEVVMAPKELAAYFGTPEKPECHMLYNVSTMVNLWGALASRDTRLLKAQLDALHALPDNCWFVNYLRCHDDIGWGLDEAVEKRLSIDPQKHKEYLYHFYEGNFPGSWAKGELYNYDPATGDARSCGTTASLCGIEQALEKDDKTALDYAVKRDLLLHTAMAFLQGFPMLNCGDEIAQLNGWDYKNDPDRVEDSRNLHRSKFNWEDAKQRTRKGTLQNQLWQGMEQLRQMRADPCFAPDAWVTTWDSHNPGVLALVRKRGEETLVGLFNFTEYPAGASLDALGGEYHTPEGTSVWLADVELEPYQSLLVKNKMYMTNEEWKQNNQDYLKESYEETGFTAGGYAVHKLICGGCGRVFYTTIYTKKYCHSYWCGNQANNLRQREYRQMRRQDLVCQCCGEKFTPKRADARYCSNSCRQKVYRKRVTDAASTQNEHIVFRTVSRSVENQVPPPGTMMLCVISYWVLSGAKWRQIQQLRCCALSRQAVEMKEASTKPYTKIRKKMAYRSFPQWEIMAFVAFRLEEFASALQEKYNRETWNRTGTESSMTAVSTLPTVSTSTRNEPXXXXHGFRSALDPQDLDDLAATFSDVERQFYETHYTAFVESQNERNAKIRHTERNRSIPDLLSSRKTCPEETIYQLGTLDEHASAEDLLNIVTEFIEEFKVKYGEHVHVLDWALHLDESTPHIHERHVFDCENKYGEVAPQQEKALEALGFELPDPDKPLSRRNNRKITFDAACRKMLFEIAKRHGLDLEEEAEYGNRKYLEKQDFILAKQKKQLAAQQSKLNELTLKVSDMETLLEDVSAAAYDKAVEVVTDVVRTETRTEDMRMIEDTKKWVLSPERKAPQSTREYAAHRLDTVLDKFLKTMQTTATRLQEKLLKPEVRQKGKEQVKEKARDSVLQLLNRLQAEQAQRKPSVPPTAEKSENRFQSMSKEVNEERAPRTVEDVKEMLTKHSNGEIQRTIQNCITILQNDHVLADAIRLNLLSERIDIVKPVGWPRSGKTLNDTDMKYILRRMEKYGISNEKKIESAIRIVANENRYHPIRDYLNGLQWDGIERIAHVLHHFLGAAEDEYTCEAMKIFLLGAIKRVFQPGCKFETMLCLVGGQGCGSPVATSKCCRHFEAPTEPTGETGKVQLFSAVGGQGRMVLGMAVKDEWFSDDLRRLDDDNVYRKLQGHWIIEMSEMIATANAKSIEEIKSFLSKQKETYKVPYETHPADRLRQCVFAGTTNRQDFLPRDRTDNRRFIPIPVDAELAEVHILDNEEESRAYIDQLWAEAMTIYNRGDYKLAFSPAMQETLQAHQQDFMQEDAQAGMIYAFLEDYTGDRVCSKQLYAEALGNTNIPAEWETRAICEIMNTGISRGDIQGWQAHKTAKRYPKYGVQKGWERVTSPETGAEDFSEIADAEAKQLGFPFMHQQDGGTKSRQVPIWEKSNLTLEEAAAYSGIGINKLRSLSDNEHCQFVLWVGSKRLIKRRKLDEYTERMYSLMATNQNTKRKDKARVVLRKGESQRKDGKYDFRWTSPDGKRHSIYAATLEELREKENDIQRDSLEGIKAEARYVTLNDVFTLWAKVKRGLKDNTFRNYLYLYRQFVEPDFGKSKVSALKKSDVKQFYNTLADERGLQVSTIDSVHTVLHQVLDMAVDDCYLRSNPSDNVLRELKKAHQFENNRRKALTVAEQNLLLSYLSKTPKYQHWYPIFAVMLGTGLRVGEATGLRWCDVDLEEGTISVNHTLVNYDRRENNGGKKGCYFNCHSPKTKAGVRTVPMMDFVKEAFEKERAYQEEAEIHCTVTVDGYTDFIFVNRFGECQHQGTLNKAIRRIIRDCNDEVLAKNPNSTVLLPRFSCHTLRHTFTTRMCEAGVNIKVIQDALGHSDISTTLNIYADVTKELRKSEFENLDRQFAQWKDPEEMNLYRLELKRVCKTRMTAILLAIALVLAVVMAYLPVTFIGWTELDAGGNEVRYTGLKAIRKRQEQQVSGTITPDVMQEALEAYQRVYRQYDASSINDIPVEVFYKELARYQPLVNNAKEAFADPKTGMAPGVMGLTAEDMQNFYSQLPKRLESVIWLEQSGKPGYEQAQAIAQKKFDAVQKPFTYSFGVSSDAMDYQTLLSLLLTLLCAVIAAPVFASDAQTGAQDIQLCTKNGGLRLAAAKLAAAFSITGAAYLLCGVVWILVTNALFGWESTQTSVQWLFSVTSLLPYTVGQMEWAMLVANFLIFFAEVAFVLMASVWAKNNLTALSVALISVVAPLIVYMVVPGSFGEWLSTLIPAGGIGLSNALLYKMISFDFLYAGGHAFFQADVLLASAPIKIVLLVGLAAWGYLRKTKVAMELKIQNITKRYRDKTAVDDVSITLTPGVWGLLGANGAGKTTLMRMLAGILRPSSGRILCDGVEIGTLGAAYREKLGYLPQEFGFYPEFTVQDYLEYMAALKGLPHTEAARQIDALLERVSLIEVRRKKIIKLSGGMKRRVGIAQALLNDPEILILDEPTAGLDPGERVRFRNLLSEFAQERIVLISTHIVSDVEYIAAENAVMKAGKIIAQDTTEGLVKQIEAKVWQGNIPMEQLARWEYRLRVVNLRNEPDGTVTLRYLADAPQLPDSVPAQPRLEDLYLWLFPEEMEEAKMNRAFEKELSRALATELDTAAPKTLLRRCRAEHVVKQRSDWRDLLHCQFKLLGWKVWVLEAMAALALYSVGRELALWEKAWTLRNALFGLSTLAMLTALLGLPFLYRASQYKMLELEQATYAGIGRPLVMRFLLLLAGEMILLGVLVLNVRAAVPWSIGQLLAVLTVPFLTANNELLLLLRWVRPEWMMTGAVPLFAGQLCLLRFVRLSELPKGLPLAAGVLVLCMVLQCIRLAARSEYIAEGMNRIQTELLLRKVQSGDTGALDTLITAYYPQILNYCRWHTADEQQAQDAAQETFLKAVRWLDSCGGFQGAFRPFLYKIAKNICIDLNRTMERSEVSLESLPGEPAYQESGFAAAEEKANLRALTAQLEPEQRELVLLRFAQQLKLREIAQITGLPLRTVQSRLRAALKTLKMQLEKEDWRMLRYAAQTRTFENTLLSATCKKRQGKLWQKERGLDGASPLDKEKHKALYYNKAIRTMEICSRFTGMERKNGAFLLHTDNANVKVCFVTDEIVRVRASFDHELAEEPYVLMTTAWEDRIKPLSDVALYRSALIHHTPDSYTKRELVGAGPSILLTQDRSVAMESIHNYLIYLRMQHCRKALEEGVSVLNACTESGFPDYSSFLKTFRRLYGITPAEYRAQHRTMVRMPERSYYKMGKFYSFCRATSTISSGCGADAIAQNCKNDRFYLEDLLTLPKQKQYDKSMTNTYYFGCAARSEGGASHFDVNTKKQIEFMEKNVLNTDLTGKVAVVTGASGTLCSIFAKALARAGAKVALLGRNMDKLKELADKIEAEGGTAKGYTCNVMNKANCLQVAEDVLADFGPCDILVNGAGGNNARANTDKEYFEMADLESDTVTFFDLDESGVEMVFNLNFIGTLLPTQAFARQMVGREGCNILNISSMNAYLPLTKIPAYSGSKAAVTNFTQWLAVHFSKVGIRVNAIAPGFFASEQNAKLLFNEDGTPTDRTKKILAATPMGHFGDSEKDLVGALLFLLNNDAAGFITGICLPVDGGFSAYSGVMRWYEYKMEVDDLTAPDDLKAKLLAMTDTLTAEEKAEPMMAAPAPQTAAPAAPLNTEAKKKKPIHFPVKQLGTLAACLAVCVLGYSTLHLGIGMGSAKSSAPALYAAEGSADSSAASVAAGGFDLQHAALDSTPEAVNYSLEAGDRSLETEYSGTGSTEAAAPAVDSAKIIYTANLTLESKDYEAARSALDSALAEAGGYLESSSEYSSSGSSRSVSLTYRVPQANYQSFLDAVAAAGNVTYRSQQADDVTTQYMDVSARLSNLQAQRTRLQQLQEQAETLSDLLQIEDSLTEVQSQIESWQSQLDWYSDQVQQCTVYIDLNEVQTYTPADEGFFSRIGTALVSGWGNFVNGLQQFVVALASVWPLAVLACAAVAVALAWRKKHPKKMGQLTRNEVFTLAVQRYSDTVYRTAVHNCRCTADAEDVVQDVFEKLLHYNGIFESEEHLKAWLLRVAINRCRDLTRAAHQKDTELDENLPAPDVLAEDGSVLDAIRTLPENYRNAIYLHYYEGYTTAEIGRMMAVPTNTVLSWLRRARAQLHTMLKEEIEDEVVMGGGHVSRPDFGMPQPDAAYPLTEFYLLAQQALEKSGSFMLPALYAGLQAPARRIYREEAAGYLQLAAAPAEGLTRLLSPARMQLLYSSLQVQPDGTPAALLLTEECTRLTVAVQLLPPFVWEDPLPPLPDVPAALTLQLTMQDVMAIDTAPAALAQKLVHSTDGKRWLHHPKAETFLSERLALLQRVYKMDLSEMLNLLMVILTLLGLIIEVIRLTLEVMDKASQKKNDDNKKDMGKHDHRLCNQRRILRISYFLTDYNISIDCKPFANFSVDLWRTGAVYSGTDALQNEKTEGKLTMKDKKLTTYQMAVTAVMAAVLCVLGPLTVPIGAVPISLANFVICLTAWLLGPKFGTLSVVIYLALGAIGIPVFSGYGAGLAKLAGPTGGYLVGYLLLAFIGGMFIEKSKGNPVVSAVGLVLGDAACYVLGTAWFVFQMQCELGYALTVCVYPFIALDLAKIVVSCIVGALLRKRLTQAGVLKLQNAVSEMELKNRSFLKLLDYTPAEIGQLLELAADLKAKKKAGIRHDQLRGKNIALIFEKTSTRTRCSFEVAAHDLGMEVTYLDPSGSQIGKKESIADTARVLGRMFDGIEYRGYGQQIVEDLAHYAGVPVWNGLTNEFHPTQILADFLTIQEHFGHLKGIHFVYFGDARYNMGNSLMVGCAKMGLHFTACAPKKYQPDPALVEQCQAIAAQTGATLSFEEDPVKAAKGADVLYTDVWVSMGEPVEVWAERIHDLAPYQINQDLMNIAGPDAVFMHCLPAYHDHKTTVGKEMGERFGRDAMEVTDEVFEGPQSIVFDEAENRMHTIKAVMAATLGYQEMKREDYINWDEYFMGIALLTAMRSKDPNSQVGACIVSPENKILSLGYNGMPMGCSDDEMPWEREGAPLQTKYMYVCHAELNAILNSAHNNLKGARVYVTLFPCNECTKAIIQSGIAEVVYYGDKYHDSDSSIAARFMFEHAGIRLTPYKPTGRRIELELMLPLTRKRKGGCLMTFEQVVLLLTLLGGAIYITFEITWTISNGKKKMAYFTKIIPHSKRFLNISFQNLAKTPAKLPGTVLCKLTFGCKTGGMKYASNNIRNILIAGHAGSGKTTLTEALVYFSGAAERMGRVEDGTTISDFDPEEAKRKASLSASVVPVEYEGIKYNLIDAPGLFDFEAGEYEGIRAAESVLVCVSGRSGVTVGAEKAFQLARKNGKATMVFVSKCDLENANYFKILEDMKIRFGSTVCPCVVPAKLDDGTPVYINLFSQKAFKYEGGKQIQVDLPDIGHRFQGLIEAMGEAIAETDDELMEKFFGGEPFTTEEIVEGMRKGVKDGLITPVFCGSAVNMQALDMLLFNMHKLLPSPEHEASTLAEDANGEPVELHCTEDEPTAAYVFKTVADPFVGKLSYLRVISGKVTAGEPLTNARTGEVEKITKPLTVLGKKQIENDGIGAGDIGAVAKLVSAKTGDTLCDADRVVKLPAPVFPKPSLFMAVTVAKKGDEGKISSALARLMEEDPTLCYINNAETHQQVIGGLGEQHLDVVKAKLKNKFGVEIGLEAPRIAYRESIRKACQKQGRHKKQTGGHGQFGDVIINFEPCDSEQVVFEEKVFGGSVPKNFFPAVEKGVRLAAEKGVLAGYPVVGLKATLLDGSYHPVDSSEMAFIMAAKLAYKAAMPEAGPVILEPIHTLKAHVPNDNTGDIMGDVTKRRGRVLGMEPDEDGLQTIIAEVPLAELANFTTFIRQTTQGRGWFTTEFARYETLPEMLVPAVVEQAKKLGNLDEAADDMCCVMGYTGHDLSAEKFKEYLLRTVDRGPDDQRVVEGPYGLMGFGRLAIMGLTPEGMQPFYRGADCVVCNGELYGFRFEKEILKRRGYKFCSDCDCEILLPLYYEYGLDMFRHMDAEFALILYDSRKDRLIAARDPIGIRPLFYGYSKSSHKIAFSSEMRNLIGWCDDIRPFPIGSYYCDGRFVRYEDIADVPAPMQDDMPTILQNIREKLIAGVEKRLDADAPVGFLLSGGLDSSLVCSIAAKKLGKPIRTFAIGMDTDAIDLKYARQTADYLGSEHHEIIINREMVLSSLEEVIRLLGTWDITTIRASMGMYLLCKAIHEQTDVRVLLTGEISDELFGYKYTDYAPTADAFQQESQKRIRELYMYDVLRADRCISSNSIEARVPFGDLDFVRYVMAIDPEKKLNRYGKGKYLLRKAFEGDWLPPEILWREKAAFSDAVGHSMVDDIKEYAESLYTDEEFQMRRANYSAHCMPFTKESLFYREIFEKYYHDQSRTIVGFWMPNKAWPGCNVNDPSARVLANYGASGVMARSDGYNTRTRQLILDYLINNCQHAVSASNILEHLEAQGASPNPTTVYRYLDKLAGEQRIMKYVADKGERAVFQYVDEGRHCREHLHLKCVQCGRIYHLDCHFMDEVRAHLMAEHGFTLQCEGSVLYGLCRHCAQNAAPSAAEEQPAKKCACCVDTDKNPMRVSVLSGVDVLFFTPIVAQFALGCKRSGRKVGLFGDKHKKHCKKMKEQDAQAKLSLKLQAYQYLKTKILNCEYRPNEFLNEQKLCAEMGNISRTPMRDALGRLEQEGLITILPKKGLMVSGITEEDVHSMFEMRLLVEPYALRTYGNAIPREQLEAYTELMHHSERIEDFCKSDDDFHELLMSTLPNKYLRSAYDRITGLNTRFRIMTGKVSMINQEQTCEEHLQILDAALAGDWDGAAMALQHHLELARDKAEGVIKVIRLWMEMLQLNDLHKTFNPGTVNEKVALNGVSLQMEAGDFATIVGSNGAGKSTLFNAITGGFIADEGSILLGGQDITFAPEHQRSKVIGHLFQDPLKGTAPNMTIEENLALAYLRAGTAPNAIFSRISRKDKALFREKLALLDMGLEDRMKQPVGLLSGGQRQALTLLMATLVTPKLLLLDEHTAALDPATAEKVLTLTKSIVAEKKITCLMVTHNMHQALELGNRTLMMDAGRIVFDVKGAERSKMTVDDLLEKFRENAGKNLDNDRILLSKVEKMLASIFSLNVLQTALELGCIYGLVALALFLSYSILNIADLSTDGCFTLGCAVACQVALTGHPILALAAAMAAGVCSGFVTAFLQTRLGVESIMAGIIVNTGLYTINLAVMGFSSTMSLVKTPTIFSMAKTSLGFLGSWYKLALAAVIIAIACAAMLGFLGTRLGLSIRATGDNAAMVRASSINPAFTITVGLCVSGALCALSGGLLAQYQKSCDINVGTGMVTIALASLIIGETLVGKRTMLRRILGVVFGSCLYRFIVAVALRFNVPAAAMKLVSAIIVAVAISMPAIREHFAFEKRRHAARARRTVTNREGQMKNLNMISRRSFLKAALAASAVSAMALTGCGGAASGAASGSASSAAVSSSAAASGSAAAAGETFKVGIVNYVDHASLNQIVESVESRLDAIGKEKGVTFDYADYYANAQADQSNLNQIGADLVADGVDVIVAVATPTAATMLAAVEDTDIPVVYSAVTDPAAAGFDGEENITGTSDALNTDAIMNLIVAANPGIDTIGLLYDLSQDASTQAIADAKAFCEKNGIKVVEKNGTTTAEVQMAAEALVAAGVKAVFTPTDNTIMTAELSIYESFIEAGVQHYTGADSFALNGALVGYGVDYVQLGEATADMVSQLLCDGKTPADLPYQTFDNGIVTINTETAEALGLDLAALKEAFKPYCTEITEVTTAESFSMEKFKKPRLLTPRGQSHKKFWQAVGLCALTAAIFFLPFYILDGGFFHYAGDFNSQQITFYRYMNGFVKGAGYPDSAFAGAPHNTFSWATDLGSGVMNAYSFYLYGSPFFWLSVLLPQSWLPYMMVPLLVLKFGVAGGGAFLYLRRYVKNENYAVLGACLYALSGFAVYNVFFNHFVDVVALFPYLLWALDEAIYENRHGLFAFWVAVNLLNNYFFFVGQVIFLCIYFVCKLTTKDFRLTGRKFGHLLWESVLGVAMGCLLLFPAVLSLLQNPRTIDLSSGWGFLTYAKVQQYLAILLSWILPPDSPYLTSVWSEGVIKWTSMTAYLPLCSLAGAMAYWRSRKADSKKRIVAVCAVCALVPVLNSAFYALNSSYYARWYYMPTLILAAMTVNALEDPDVDLDAPARGIGWIMLATLVFAVVPVRDDTTGTWSFGVLKNPEQFFVVLGFGLLGLALYRYLCGIWRQNSRFAQRMTAAVLVFACVFSMVHIGIGKFGQWHTDSDLVEQDTNALQLKNDLPEGDYRIDTYKIHDNIGMWLDKSCLQYFGSTAAPSILSFYPGLGVKRDVRSEPEITNYALRGLLSVEYLITTPEKRESFEDEADAGWTYLADVDGYTLYHNDNYVPMGFTYDYYVTKTTYEASVKTLRSNLLLRALVLEDEDVKAYGQYLTELPDAMLDDLHYDSYTQDCADRRAHSCSVFQMNNAGFHAEITLDKTNLVFFSVPYDDGFTAYVNGEKADILRVDEGLMAVLCPAGASSIDFVYQAAGLSASRVVTAVAIPVWVVYVAYFVRRKRRSTGAPAEEMLYPFSALLARMKYITRWSLMHSTRPESLSEHTCDTALLAHLLCLIAKHYTGTPCRPEVVAVAALYHDAPEIITGDMPTPVKYHSPALRDAYKALETESVRSMAALLPAELAAELTPCMDGSVLTAEEHRLLKAADRLSALIKCTEEQRSGNHEFDAALTQQRAALQAMQCPEADWFLAHCLPCYTQNLDELTKLMVAKENQKTTSDFDALEPRKRGCSPLLTPEKWAAPKKTKDSRLFGVKIFMEPLKIGNITLPHRAVFGPMAGFTDAPCRRLMAQHGAGFTVSEMVSSRALVYGDHKTVSLLKAAPNGAPYGVQIFGEVPEIMGEATAAIEQYEFDFVDINMGCPAPKIVSGGAGSKLMLDPDRCGRIVEQVVAHTKRPVTVKMRKGWDADHITAVECAKACEQAGAALVAVHARTREQMYTPGIDPEIIARVKDAVKVPVLGNGDIHCAEDALRMVRETNCDGVMIARSALGDPWLFERVNAALEGLPAPKEPNLQARMNALRRQVEEMVEQKGEFVAMPQARAQTMHYMKGLKGAAALRRYCCTLTHLEDLDELIAAVFEEQRKAGLDPDDVREVPFPMKMRLERSAERGKREIKNNFSAEYAQSNAERIQNRLPQNRYKENPWNLMTDFEKTYQNYNPRQAALDEARALLTAAAKAAMADGTLPEAELPAFIVEIPADVKNGDIASNLAMAGARTWRKAPKMIADALLAHLPSLENSVFSKVEVAGPGFINLFLSQSFWAGVVLGACANKEYGRTDHGKGAKYNVEFVSANPTGPMHMGNARGGALGDCLAAVLDWSGYDVTREFYINDAGNQIQKFGKSLAVRYLQQFCGEDAYPLPKECYQGGDIKVLAGEFAELNGDKYVAACKGMDEEALFESEAFAALKDALVAYALPKNIAALKRDLGKYRIDYDVWFHESTLHESGAVLAVVDKLLELGACYKAEDGAIMYRSAQYAAKYGTVNKKKTEDGTEEEAKDEVLVRANGIPTYFAADIAYHYNKLATRGFAKAIDVWGADHHGHVARMKGAMDAIGLNGEDLDVVLMQMVNLMRDGQPVRMSKRTGNAITLTDLLEEVPIDSARFLFNMHDAGSGIDFDLDQAVKTDNDNPVYYVQYAHARICSILKKMESEGVQFAGAEHIDATLLTEPSEMDLIRMLAAFPQEIVMAAEKYDPSRINRFVIDLASAFHRFYGNCRIQGADPAVQQARLALCIGVKNAIFNVLTMFKINVPEKMMSKPLKEDYIIRIKSRIEQRLDEPAAEEEKEEFVELMTRGSLVLKGGSYYVTYRETETTGYEGCTTTLKIAADGSRVAMLRFGKGGGAGTQLLIEKGRRNLCHYETGFGSMTLGVTADEIDCQLTEKGGTARFAYLLDADSAELVSRNRLEVTVTHVNMDNRPIGVFDSGLGGLTGVRELRKRLPHEDIIYFGDTGRVPYGSRSPETILQYARQDVAFLLSKNVKCIMAACGTVSSTYPAAEAAQLPVPYLGVVDAAAREAAFVTRNRRIGVIGTAATIRSRSYEKLLRQLVPGVEITARACPLFVPLVEAGYVDHSEAGKQQITKLVIAQYLTEVREAGVDTLILGCTHYPLLKSMIGEFMGPGVTLVDPAMTAAHHLERMLAERGLRASHESGQAHFYVSDVPDSFVQTADLFLGEYKGGPVEQIAIDKYMQSANKMCVALLFGGMSSEHEVSCVSVGNFVRNIDRSKYEVLTVGITKEGRWLYTEATAEQMADGSWEELPGNMPCVISPDRADHGMILFTPDGRVEKMHLDVVIPVLHGLWGEDGTVQGLLELAGIAYVGCGVLASSVCMDKAVANALFEANGVPHTKWVAANRWEIEKDLEGVCAGVEQKLGWPVFVKPANAGSSVGISKVSNQEELKAAIALALENDRKVVFEAFVDGQEVECAVIGSDPAVATRPGEILAGAEFYTYDDKYKNGVSQTVIPAHLPEAKLDEVKTYAAMAYTALNCEGLARCDFFVEKNTGRVLINEINTFPGFTAISMYPKLMEHEGLPVPQLIDRLIALAVERTEKQHGMTVKITLACTECKQRNYNTTKNKKNNPDRLEMKKYCRFCKKHTVHRETKMADKTEKKPGFVAKAKAAVKGFCARVAKFFRDTKSELKKVVWPSKQDVKTNTIVVLVTVAIAAVVMILLDAIFGGILGLIIGAMEESTKLVDESTEALWYVVHTYSGYENKVANDLQTMVENRHLQELICDIKVPVEMVPEIDKNGKQKMVEHKLFPGYVLVKMVMNDDTWYVVRNTRGCTGFVGPASKPVPLTAEEVEKMGVEKAAPLSVDFAVGDTVQITAGPLEGFMGLVEAIDTENFKVKLKVNMFGRETPAEVEIGQVELPMAQKVTGYIKLQIEAGKATPAPPVGPALGQKGVNIMAFTKEFNERTKNQMGYVIPVVITVYADRSFSFITKTPPAAVLIKKAAGINTASGKPNKEKVASLTAAQVEEIAKTKMPDLNAASLEAACSMVRGTCRSMGVTVEGMKHGKHYVDAAKLVDSTKAYDVNEALELACKTASAKFDETVELHVRLGVDGRHADQQVRGAVVLPNGTGKTVRVCAIAKGPAAAAAEAAGADIVGDDELIAKIAGGFMDFDVVVTTPDMMGRVGRLGKVLGPRGLMPNPKAGTVAPDLGKAVSEAKAGKIEYRLDKQNIIHVPVGKASFGAEKLYTNLDTVMEAIAKAKPAAAKGTYFKSATIATTMGPGIRLNTLKYGVMAEKFCRKLKKVLDNAARLRYYNHAVFKTAGAGVQCKVMPSAKILSEKQAYVADLKAKFESAVSGCVVAYGGINVENDTKLRKELREAGVDYMVVKNTMLRLAVKGTALEGLAENFKGDTAVAFAHEDDPMAAARILCKYQDGDKSKKFVVKAGFMEGKAMNAAETNAIAKLPNREGMLSMFAGALTSTLSGLAVAMQAYADKQEEPAAMASEKITAIIESVKGLTVLELKELIDTYCEEFGVSAVAAAAPAAAGAAAAAEEEKTEFDVILAEAGATKMQVIKVVKEITGLGLKEAKAIVDGAPKAVKEKVSQAEADDIKKKLEEAGAKVEVKMKTGLVLEGGAMRGMFTAGVLDVLMEHNIQLDGAVGVSAGAVFGCNYKSHQIGRTIRYNTEYCTDKRYASFGNLLRTGNLYSEQFCYHTVPEKLDPFDTEAFRENPMDFFVVCTDVRTGEPIYRKCRTGNAEDIQWMQASASMPLAAKIVKIGHYQLLDGGVADSIPVRFFESIGYKRNLIILTQPKGFVKQKNKMLPLIRARYVRYPAFVEAVADRHQRYNETLAYISMLEQSGRAFVIRPPIPLEIPSMERDPAQLRRVYETGRAVAQIQIDKIAAYVEESKATTEEMKMLEDRIRKDGIVREGNVLKVDSFINHQMDIPLFREMAREWKRLFAGKPINKVLTIEASGIGIAAVVASELNVPVVFAKKSMSINLDYDNYKTQIQSFTHKKIYNVIVSKKFLTPEDHVLIIDDFLANGCALMGLLELAEEAGATVEGIGIAVEKGFQQGGELIRSKGIQLESLAIVDAMDSTTGEITFRPQPNQNMCGSKPTDALRTLPERAFRLRARLIAVGLCAVCFAGLIGRLFWLQLCTGGWYTQRALGQQLRDTVVPADRGKIYSADGALLAANSSCWTLRASPREMPEDKLALAAKGLAEILELDEAKLLEKFSDRRSNDCLLRYRVERETADAVRDFCAENGITGVRINQDSKRWYPQGELLASVLGFTNVDNAGVSGLELEYNDTLTGQNGVVLTAVNAWGYTLAQSYETELAPVEGCGLRLTIDANIQHYLENALNYAVQEHHVAARSVGIVLEVNTGAVLAMATTPAYDPNQPRVIADKAARAAVDALSGKERAAALQLAQQTQWRNKAVSDLYEPGSVFKLITCAAALDAGAITRHSTFYCGDSISVAGTRFHCANHKRHGSQTVTQALENSCNQSFIQIGARLGKQAFCDYFAAFGLREPTGIDLPAEPKKSLYYTADRMGPVELASCAFGQSSKISYLEMAAAVCAVVNGGRLMQPYLVSDILAPDGSVLQHNQPVCKRQVIQPATSAAMREMMEAVVLYGGGRNAQIAGYRVGGKSGTSQKLDSADEKARIASFVAVAPIDDPQFLCLVCLDEPHSWTTAGGSLSAPVCAEVLEQTLVYKGVPRAADTGSADAQAAALPADGDSFDGAMHRTAARKGLLRPLPPMDLPFLVLVLTLVAFGLVMLCSASSAVALYRRQDAFAYVRPQLLYAAMGLGAMWMASRVDYHIYHKLAWPLLALSLVLLTAVLFMPEYNGCKRWLVLPGLGTLQPSEIAKFAVVLVFAHIIALNHDRMDSFAVGVVPFALVLGVVAVLMLLEPHLSGTVLILSIGAVLMFVGGTGLRWFMLAGAGGAAAIGTAIVLMPELVPYAADRLNSWLDPFADPLGDGHQTIQSLYAIGSGGAAGLGLGNSRQKHLFVPEPQNDFIFSILCEELGFLGACAVILLFSALLWRGITLAAYAPDRFGALLVVGFVVQVALQAVLNIAVVTNTIPNTGISLPFFSSGGTSLMMLLGEMGIVLSVSRGESMAGDWIITGGRPLQGRVEVPAAKNSVLPLLAASLLCSGPVRLQNVPRLTDVEDCLALLRGVGCTAGWQGAELAVQGQPMRTDLAPEAAGRMRASILFCAPLLARLGRVSTVLPGGCRIGARPIDLHLQGLAQMGVRQLPAAPGQLTLYAPAGLRGAEICLSFPSVGATETLLLAAATAQGQTVLHGAAKEPEIADLAAFLNACGGCVEGAGTDTIRVQGRRCLAGCTFMPVADRIIASTLACAAAAAGGRVELAGCAPGLYAPLLEILEQMGCTVERARDAAAISRFGALRGAGNVHTAPYPGLATDAAPLLAAVMLYAQGESRLQDRVFENRFACAEGFAALGANVRVAERTLYVQPGGTLRGAKLTAPDLRGGAALALAALAARGSSRLGGVEFVRRGYADLDRLLAGLGAQIWQEIPARSGVVKKTPTKKQFCLAIGAKKMALMLDEELDENVTTIKVIGVGGGGGNAVNRMVSDGLQGVEFIAMNTDQQALAKNHASVKVQLGSKLTKGRGAGADPEIGQRAAEESKDEIANALKGSQMVFITAGMGGGTGTGAAPVVAEVAHDLGILTVGIVTKPFSFEGKRKMGLAEQGIANLLMHVDSLIVIPNERLKMISQEKITLMNAFQAADNVLRQGVESISALINVPAFINLDFADVRSIMKDAGYAHMGVGSAKGAGKAENAAKAAISSPLLETSIAGAHGVIINITSSPDIGLEDVETAAGLITQSAHPDANIIWGTAFDENLSDEMRVTVVATGFDNKSASDLRNSINNAMGGAQSVPSAVFSSDTGASAAPASNAAPAAAPAEKKAVEEESSDNRYYDELLAILNKRKMVQTERETGALRGQFARQAAVQASAAAQAESARAQAEQLSRKLAAARAEVRRYQTRMFAFERTLLALKHDNAELEAACEQAWEQLEQANARAEKAEAACRRAEAALAAMQQTAPETPAQPDTAPEAVPQCEAAPEQPAPETEESLCAPEQALPPEPAQPAWQPETRLEQMAAELMGWFDAMMPQEMLSNNVCKGYCKNWIAFIQPGMKTFAENTGKGRNVARSLAFCCKIQMNEKPKILIADDSEINRALLKEILGDGYDYLEAEDGAAAVELMRQRTDISLLLLDLMMPGMDGFDVLRVMKYHTWLDEIPVIVISAAEDTANIERAYDLGVADYIRRPFERIMILRRVKNILMLYAKQKRLTRLVTDQVYEKEHNSVLMISILSHVVEFRNSESGLHVLHIRTLTDLLLHQLVQKTDRYQLDESDIALISTASALHDIGKIVIPEEILNKPGRLTAEEFAIIKNHTVAGAQMLQDLGQAIARDEPLLQVAHAICRWHHERWDGNGYPDRLKGDEIPIAAQVVALADVYDALTSERCYKHAYDHDTALRMILNGECGAFNPLLLDCLRESSEQLRTELTRSEWDRGFRQETHRLSEEILHREALPRENHSQLLLEQEKERTDFYAAQCGGIRFDYDLLAGSVTVYDYHAEPLQQKTVTDFAQGKGLGFLNEQDRRKLSKAISRATPEAPDVVLPVMVQRDGKPHLHRMALHTIWSGAGVRRCVNVLGHLTDEQHRVEHQAELLTAIDPEEDPARFLRRLQGIFDVVRLVDPEHRKVLALDSDGILTEKPGNCHMVWNKDTRCENCISAKAYARKTILNKIEFKDEEAYFVISKYIEVGGRGCMLELVTRLTDGRWLDMGGHRLLLDRCNGMERSAFVDPLTGAYTRRYFDKFLAGGEMHGGVAMIDVNQFKSVNDSFGHLVGDEALQTVAAAMQSCLRQTDILIRYGGDEFLLLMPQNCPDGVESVIRRVQNAVQAARVPSHPELRLSVSIGGVCNVQPLTEAIRQADARMYCNKENGEPVLMGLLEDARNIQRKDPAARSVLEVMLLYPGFHILVYHRIAHWLYQHKHFFLARWVSQHGRHRTGIEIHPGATIGKCLFIDHGMGIVFGETCEIGDNCTIYHGVTLGGTGKDTGKRHPTLGNNVLIGAGTKVLGPVFIGDNARIGAGSVVLRNLPANCTAVGVPAEVVRINNKAVNPADDLDQQDLPDIVSQRLTDLDRRLSQLEKAAQGDIPPTAAQIAARQRKMLCSAQNPKLNKQFASGFAVASLFPFFAQMLLTNAVNTEGRPLEIYVKDGKIAAVGQDLSALAAENETVVDAGGLTVLPAFVDLHCHWRTPGFEYKEDIETGSRAAAAGGYTFVNLMPNTKPVCSSAAQAMMVEQKAAEVGLCDANQTVSITENFDGVSIDHLKTLPASVKFITEDGHGVQDNATMARAFAICTQKDITVMSHAEDMEISPWDYRLAEDIETVRNCWLSEYYQTRLHMCHVSTRGALDAIRMAKLRGAPVTCEVTPHHLWFTNDTCDYRVNPPIRTADDVEALVEGIRTGIVDAIATDHAPHSEEDKLKGMAGMVGSETAFGVCYTKLCKQEGLPLELLVHLMSTRPAEILGLAKGQLEPGFDADFVLVDLDTPYTVEKEKLHSKSHNTPFDGAQLYGKVFATIKAGKITYQAEEMTNMDKLYEAVEARGPVCVGLDTDFSYLPADFVDSTLTKGENIVRFNKKLIDATKAVAGCYKVQIAYYESLGMEGMKAYADTLKAVREAGVPVIADIKRGDIAKTAEMYAMGHFTGDFESDFVTLAPYMGLDSISPYLPYAEKQGKGMFVLCRTSNGGAKDFEYEKLADGRHVYDLVGDKLNALGKDYMGEHGYSSIGLVIGGTHIEEATEIRAKYQDSFFLIPGYGAQGGKAEDIAQYLTKGNGGVVNSSRGILLAYKKQPGVAFDEAAYNECVNMKEAIAHACSLLMRAACCEATVLRNEVIAPDIRLLTVAWPDRDHAPHAGQFFTLRSWGTDEAPFLSRPISVHRWNPDSSTIEFLYQVVGEGTEKLAQLKQRDTFQLTGPMGNGFDVPDIVSKYKKIAVVGGGIGTAPMFQLTRELAAAGVKPDVFFGFRDTPYCMEEYRSIANLVKVSTDTGAVGFHGFVTQLYDPADYDVVLVCGPTVMMKNAARLCAEKGTPCFVSMEKKMACGIGACLGCTCETKGGEGKSVCKNGPVFDATEVFFMADLKTNLLGFVMNSPVIGASGTVGYGVEYEELADFAKIGGISGKGLTLHGQYGNKGERLWETPSGLINSIGLQNPGVQHFIDVELPEMLELKQKYGTVAIANLGGHSEEEYVEGAAMLSESAVDIVELNISCPNVKVGGMAYGVKAEAAGEVVRMVRAACKKPLMVKLSPQAESIPEMCKAVEAAGADAISLTNTFQACAIDLEKRRPVFNNIFAGLSGPAVRPIALRMVWQAVGAVNIPVVGLGGIATGRDALEFIMAGATAVQVGAANFANPRAMETIANEMAAWMDKNGVKTLDEIRGCARHAEMSEALEILKSCDAFLEGHFLLSSGRHSGAYCQMAYLQQYPDRCAEVMKAVADKVKELDVDVIVGPAMGGIVYAYELARQTGKRAIFTERVDNVMCLKRFAIHPGEKCIIAEDVVTTGISSLETKRVIEEAGGICLGITCVVDRTKPEAPSPIPILASALKLDLPNYTPEECPICKEGKLPLVHLGSRKMKQEAKQTLMNAYLLLANGMVFAGQSVGAQGVTVGEVVFSTGMVGFQETLTDPSYYGQIITQTYPLIGNYGMNHDDMESDRIWAKGYIVREACTTPSNWRCEETLDSFLKKNNTIGIEGIDTRHLTRIIRESGVMNGAILTTFDPADPANKAETEALLAEIRAYAVTDAVKNVTCAAPEVFNPEGETHIVLMHYGCKRNIVRCLVKRGCKVTVMPAFATAEEIKALAPDGIMLSNGPGDPAEPVEIIENLKHIFELNIPTFGICLGHQLSALAAGAKTMKLKYGHRGANQPVTDFESGRTFITSQNHGYAVVGEELPAEMGEVAQVNANDGTCEGIKYKKWNCFTVQFHPEANGGPKDTEFLFDRFLNNVKAAKEARMPKDPRIKKVLVIGSGPIIIGQAAEFDYSGTQACRALKAEGIETVLLNSNPATIMTDPDVADHVYIEPMTLEVVERILDIEKPDSVLPNLGGQMGLNLSMELARSGYLDRTGIRLLACKPETIDRAEDRELFKETMEKLHQPIIPSEVVETLQDALACADRIGYPVIVRPAFTMGGTGGGICETREKLIEIGTNGLRLSPIHQILVEKCIAGWKEIEYEVMRDHKGNVITVCNMENLDPVGIHTGDSVVVAPSQTLTDHEYQMLRTAALDIITELGIEGGCNCQFALKPDSFDYAVIEVNPRVSRSSALASKATGYPIAKVATKIAIGYTLDEITNDVTGKTCACFEPALDYIVVKYPKWPFDKFVYADKSLGTQMMATGEVMSIGNSFEAAMMKAVSSIELGMDTLTHKPFEELTDEEVVEHMHVQDAERVFCVYEALKRGIDHKVIYDITKIDWWFLDKMQHLADLEKGLAQCNGVLSVEQYKTAKKYGFQDKTIRRLAQVDTLPVENYRAGFKMVDTCAAEFSANTPYFYSTYDGDNEAASFIAEKEAETAAKGEPKKKKVLVFGSGPIRIGQGIEFDYCSVHCVWTLKKNGCEAILVNNNPETVSTDFDTGDRLYFDPLNPESVDNIIATEKPDACVVQFGGQTAIKLAKHMDEIGLPILGTPADAIDEAEDRERFDELLERCNIPRAPGRTVFNLDEALAAAEEIGLPVLMRPSYVLGGQNMIVAYNKADIIEYMGVITEHVDMDHPVLLDKYIMGTECEVDAICDGENFLIPGIMEQVERTGVHSGDSICVYPAQHLTQDEIDTMVDYTGRFARELHVTGLVNVQYAVSHGRVYVIEVNPRSSRTVPYISKVTGVPMVDMAVRCCLGEKLTDMGYGTGLHPNAPYVAVKVPVFSFEKLHAVDTQFGPEMKSTGEVLGIAPNYHDALLKGLIGAGYTFKTPGPGSCCIFTVKDSDKPEFVDIAWKLKDMGYKLYGTSGTCAWLNKHMVPCNEVRNISGEAPNIVDLLQSGLVDYVFSTSAKGRDPRRDSVRLRRKAVELSIPCITAVDTAASLVDCLRSEHSLANIPLVDIATLYRGKMTRSQMIETVARKTGFTEAQVETTMDAMFDQIADCLRADEKVTIAGFGRFEMRPRKPKAYTNPKTKVSSQLESTSIPGFKASGRFKQKLEAGKKSVEETAMLYSELQCSEAIHKAVERMGFAEMTEIQEKTIPLMLAGHDVIAKAPTGTGKTCAFGIPVVEHIQPENKYPQAVIMAPTRELAQQIAEELTNLTYFMPEVQVACVYGGANMEKQAKRLAEGCQIVVATPGRLMDHYKHHSIDISHVTQIVLDEADEMLNMGFYKDVRHIIEMMKARKALSMFSATISREVMDIGWLYQHNAEEITVQPREESQPKITQYMLETSGRNKLSDLAQIVIGEGYKRVMVFCDTKFNTATLANQLARLGFSVDCLHGDLSQKERNQIMQAFRDGKLAILVATDVAARGIDVSDVDAVINYDVPSENEHYTHRIGRTGRAKKEGVSYLFYVPEEKKRVQELLRLTRNTDLCTPVHFDFNHEHIVVEKKQDNADRFQIKCYFMKINEVEAAVGVTKKNIRFYEEEGLISPSREPGNGYRSYSQADVERLRRIKLLRKLDVPLAEIREMLEGQRTLAEGMSQQLERLRSRRADLEEAIGFCTLLQQENGPLEQLDVEQTLARLTAREEQGVTFVNIERTDQKTRRIRGACIGAALFVTMMAFVIATMGWAIYTDPQDAPPLPLLVVMFGIPAGCIVGTLKVLLDRIEEIGKGEEDAYCNYMLIVTINEIPGKKLEALGVVRGSTVQSRNLGHDMMAGFRTLVGGEVTDYAEMLTEARQIATGRMVKDAESLGADAVVGMRYASASVMQGAAEVIAYGTAVRFVMTAKEKQGFGLYFLFAFGMAWLCQVGGCMALLQQNNAVLYQLALIVTMFCPLLAVLLVQKAFLRQPTGIGWKVQGKRRFWLAAWFGPAVLTLLGAVLYFAVFPSRLDFSGSWLVAAYGGEMDAQTLRSQLGVSTLSYLLQNGLFAVLLAPAINMFPALGEEVGWRGYMMPRLKERFGLLNGRLLGGVVWGVWHWPLMLLVGYEYGTNYLGAPLLGLVVWCVVCFALNTLLDWLYEKTGCIWVPAIAHGAFNAIAALPQVLVTPADAYYNVLGPMPIGLIAALPMLAAAVWLTLREMKQEEKNMCGGCFCAEMVVESLKQPLKLSEKLDDVYKAQKKAKKMTARAPWVPQARRYYYNIIGKYGAQVQALLKKISALEIKTICPLHGPVLTEGLEECLRFYDLWSQWEPEESESILIAHASIHGNTAEEWLSNVARVLEGRSPDYLVVTHMEPDHSGSLMRLAQKYPEMKIVGNAKTFTLIKQFFGTGALSEDRMLEVGERDTLSLGLHRLRFLLAPMVHWPEVMTAYEETEKILFSADAFGRFGSLERTARAPWVPQARRYYYNIIGKYGAQVQMIFATGTPLSNSMTEMYTLMRYLQYNTLQQKGLTHFDAWASTFGETTTAIELAPEGTGYRARTRFAKFFNLPELMAMFKEAADIKTSDQLHLPVPDAKFETVVVKPSEIQQDMVQALSERAAEVHSGSVDPSVDNMLKITSDGRKIGLDQRLMNSALPDDPNSKLNACVNNVMRWGKTWRLLQKVTYHNKADYSADCFAAAEVLHILLVHENAMGDELRGENLVHLNVRFSTETELKKIQDFLYEKSGQGVSFTGLVEAMVNEVTIVTAVHNIKSNKGSKTAGVDKIKMDKYLQMPKDELILLIQSSFRNYRPKPARREYIEKSNGKKRPLGIPTVLDRIIQECVRIIIEPICEARFYPQSYGFRPYRAQKHAIRGIINVINAGCKSPDQPVWAIEGDIKGCFDNINHRLLLQKLWKIGIHDKRVLKIISQMLKAGYMENDLFHATELGTPQGGILSPLLSNVYLNDFDWYVGRMYMEPHRQCKHKGNDTRRLKWAGVTPKYNYRYADDWVILTSTEKEALRLKRVLTKYFRNRMKLELSQEKTYVTDLRTNGIHFLGFVVKAERKRKTPDPATWTKHLVGKPLPDMERLGKKIKKLLEEVHRIELCQKVNVQAAQIQYVNSVIMGMAQYLQTSICSRAYHAIDRRVNNAALAVWKKLYPKRYNSMQVSLKVLCNLPDRHKGYDSKTFAVWVEGKWFGITYAFITHSHYEPKPFDQKMTPYTVEGRRRYVNYRAKHKSLPCDRPSVNSPNDIAMSAYAKGRMNFEYYMNREYAYSRDKGKCKCCGNAFSPMLQKHCHHVKNKLPLDRINKVPNLVWLCEPCHRMVHNSPIPPELDAKTVGKIMKYREKLKLMEKVCVAGFSAHALWDEIPIRNHAATVVQSMVRFSRCKVAAELPAQHDLRHHAAKAPTCTGIGWDAYETCSRCDYTTTYVELPALNHALEQHEAQAPTCTEIGWDAYETCSRCDYTTRKELPALNHALEQHEAQAPTCTEIGWDAYETCSRCDHTTYAELPAQHDLRHHAAKAPTCTGIGEIMLPSHAPPGYADRATLWNAVEAVENQWNSQLARRIVLAFPVEVPKGRYLSMIKEFCQEQFVSKGMIADFAIHDKGDGNPHAHILLTLRAMDEHGKWLPKARKVYDLDENGERIQLPSGNWKCHKENTVDWNDQKYAEVWRHSWETITNRYLEAAGRPERVDLRSFERQGVQQIPTVHLGPAAHQMEKRGIETFLGNLNRDIRAANSLMQSIRSAIRGLQRWIADLNEKKQNDIYHLKVLNLVSLSTQSLASCVNYFCLELFTVFFQHENRFRYKFFRYCSIFKVLCMPIPCPHFKITIVKRSQGQSAVAGAAYQSGERLFSEYDQKTKFYNKKKELVHAEIMLPSHAPPGYADRATLWNAVEAVEMAATRLIALHKNKGKSVAACLKSRTDYAQNPDKTNRGELVSSYQCSPLTVDEEFLLSKRQYELATGRRQKNDVIAYQIRQSFKPGEITAEEANKVGYELAMRFTKGKYAFIVATHTDREHIHNHILYNSTALDSTRKFRDFLLSGLAVQRLSDLICLEHQLSVIEIKPYRERQKRTLYPPKESNRDKLCSVIDGILLNEKPANFEAFLQNLEQQGYEIKRGKHTSVKGARQKRFIRFRTLGAGYSEDEIKAVIAGEAEHRPHQRQQPKEQPFHLLVDIQAKLSEGKSEGYAQWAKRYNLKEMSKTLIFLQENKIGSIEEMQERVNAATAQYHELGDSIKAAEQRMAEIAVLRAHIVNYARTRPVYDAYRKAGYSKKFLEEHREQITLHRAAKNAFDEANLKKLPKVKELDAEYSALLSQKKAAYPAYRKARDEMQELKKAQKNVELFFAEEKDPKEKSQTRMENQKIEDCYSEHSSTIFSEMLGEDEDYQRLKNAKIAAEEALRSVISKEAWKQYLALDEICNELECARYKAMYLAGAADHENLSKQFMIVSPLWLITAFLALMLKWTLNLSAFVLALPMLYIFGCGLYTLYCREWLQFLILLVAEFGCFVLIFMGTLIADAAERFSGWVAGLMKEKRDEIIILRLTKTEKNRIYEKMFSMGIRSLSAYIRKMALDGYCLNLDLPQLRRMAYLLQNCSNNLNQYAKAANENGRVYTADMEDLRARLDELISIGRQILSRLAELMPSKTEEYLALAQRTANGMTRYWESWTAYLTTASRLYKYLFADQLMIYAQRPDATACADFDIWNNRMNRYVRRGAKGIALLDESSGFPRLHYVFDVSDTGVRRNSRDPEVWQYNDDLKQPVSEMLNKTYGISGERVSQQLADVAGKLVADYWDNNGGDIRAIVDGSLLMDYDDAGVEMQFKSAAAISVTYTLLERCGFEPAGWFDKDDFQAIYNFSTPDAVFALGAAVSDMSREVLRNIERTVKTTIRRRNAERSQHEYEQQERDLLDRRGLPAPEPDPEPAPEAAGQVRQAAPDVSDEPSPGAVQHDAPEREPVPAPDGGGADGREPDAADHGAASEAESRPGQGAESDGMGAAHEQPESTGRGTGADGTDLQLSFFDAHIPTEVQQIETIDQAESEKTPSAFSLSQAEIENELRKHGSGFMGGKQRIMALYQTQPDRNLRTKALAKEYGIGGHSHDFLDGSRGFVNHDWKGLEFDHYPDHQKITLKWAQVEKYIDLMIQSDRYLTDKEKEHYTPPVPVSAKPDATLTHAKNLIREFCQEEYDSEPDFSDLSKIDIAYTNATDEEIPIQVNVDLVGYRVERYLGEVLIDERQYESLEELTETELEALDFSELVSVTDEELEHYHSKAEERPALLPLDAVAEYNALKEQHPDALVGFEQGGQFEFYGEDARKVCELVGGKLLEKETELGTVPVTGFPSDQWAHRAKQLWQCGENVYLAGLNEDGTHHQTKYLRREDYLPLGAIVHMEGRAFRVDNVNFDKDSVTLQDVALAEMRMPIFREAPLAVVRELYEQEQDEPKLSDGKLDALPISAVMDRKVQNFPDAAALDEALNTEPAPEPAGNFHITDDDLGVGGPKQKFARNIEAIRTLFKLEEEHRGATAEEQQVLSQYVGWGGLADAFDPNKENWSAEYTQLKELLSEDEYAAARASTLNAHYTSPTVIRSIYDAVERMGFHSSNILEPSMGVGNFFGMLPDSMADSRLYGVELDSITGRIAKKLYPQADITVAGFETTDRRDFYDLAVGNVPFGQYRVNDKAYNKLGFSIHNYFFAKAIDQVRPGGIVAFVTSRYTMDSKDSTARKHMAERADLLGAIRLPNNAFRANAGTDVVSDIIFLQKRDRPADIEPAWVQLGKTEDGFAINQYFVDHPEMVLGELTTESTQYGREDLTVAPLEGANLADQLAEAVQHIEGQYTAAEVDAPDIAEEEATRRTLPADPDVKNFSYTVVDGEVFYRENSVMTQVELSDTAKGRVTGMVELRQIVNDLIDQQLNDFPDEDIKATQEHLNTAYDAFTAKYGLLNDRRNGRLFEQDSSYYLLCSLENLDEQGQLKSKAAMFTKRTIRPERTVTSVDTPSEALAVSIGEHGKVDLPYMAELLGTPGDYGRITTELSGVIFKDPAADPTDPEAGWQMADEYLSGDVRAKLRMAQFAAETNPEFAVNVDALTKAQPRELEASEIDVRLGATWLDPDIIQKFMTETFQIPYYLRHAVKVRYSPYTAEWRVEGKTATGRGDIISSETYGTSRANAYKILEETLNLKDVRIYDTIEDAEGKPKRVLNKRETMLAQQKQQVIKDAFANWVWQDPQRRIALVKQYNELFNSTRPREYDGSHIKFVGMNPEITLREHQRNAIAHVLYGGNTLLAHEVGAGKTYEMAASAMEAKRLGLCQKSLFVVPNHLTEQWASEFLNLYPNAKLLVARRKDFETANRKKFCARIATGDYDAVIIGHSQFERIPLSFERQERIIQEQIYETLAAINELKVHAGENFSIKQMEKTRKTLETKLEKLRSDERKDDVITFEQLGVDRLFVDESHFYKNLFLTTKMRNVAGLSTSEAQKSSDMFGKCRYLDEVTGGRGVVFATGTPVSNSMTELYTVMRYLQYSTLQQKKLTHFDCWASTFGETTTAIELAPEGTGYRARTRFAKFFNLPELMSMFKEVADIKTSDQLHLPVPEAKFETVVAKPSEIQKEMVQELSKRAAEIHSGAVDASVDNMLCVTNDGRKIGLDVRLMNPMLPDDPNSKLNVCVQNVLKIWEEGKDQKLTQLLFCDLSTPKNDGNFNVYDDIRKKLIAAGVPENEIEFIHNADTETKKAALFSKVRSGDVRVLLGSTAKMGAGTNVQSRLVAVHHLDVGWKPSDMTQRNGRIIRQGNMNKEVKVFNYVTEGTFDAYLWQTLENKQRFISQIMTSKSPVRSCEDVDEQALSYAEIKALCAGNPLIKEKMDLDVQVAKLKVLKADHQSQKFRLQDKLLTKFPADIQETNAYIAGVKADAQLAAAHPQVQEGFCGMTIKGVTYDEKKTAGERLVLACSELPNAEEKVSGSYRGFKLSLRFDTFRSEYQAILKGQRRYPVALGTDPLGNIIRLDNSLNNFPERINSAENELATLHQQQAAAQIEVEKPFPQEEELAEKSARLAELNAQLDVDEKSHEPEQDEEEQEDAPRRPSVLAALEEKSDKPEPVKPFRSYYDKDGDARMETKDVILSLRNKNNLSQEELAEKVFVTRQAVSRWETGETIPNTETLKQLSKLFDVSINTLLGTPRQLICQCCGMPLDDETLSKEPDGEFNEDYCKWCYSDGQFTYGSKEQLIDFCVEHMANENWSAEQVRAHMESLVPTLKHWKMNFNHEELMLMMLYNTGTRLGLIHELRLMQCYLMPDETALRELSEGVIEKLKLLTDAEFTELEFPPDMEQKTEALYLINGDRFLHLRENGAGVGFATYDCATGEPQEFGQISKQNLPSDGRNAIPAARNWYLFELSSDDRKAIQEVSLQHLDTIPQSGVRRRRIWDDPTIPRDDVRLINSYYDDLYRVPNHGVIQVDRSDGSSYTARVEHLDDYHFDLGEYGNVYHICQFGEMMERTGSTAYPEIQTQDEQGAWELGGKGYLAVQSCGDGWDYTLYHSDYSVIDGGQIDAPELTIQEVREQILEAHHMEKGRRLLQDYDAVMDKVAEVEELGLSNRPSTLEKLADLAGAKEKCDAPECNPTGCRKARDAHELMVGINASRLFSCLYGQPLAVGRVMTPVLAMTVVREAAIAAFVPEKFYTVDLELTSGCTASSRRIPEKSVAENLLEACRREMVATIQRITRKEKSENPPPLYDLTTLQRDANRLLGYNAQQTLDYVQNLYEKKLTTYPRTDSCYITDDDEEMLEELTEELEVFLGITPEDVDEAVPWTRRTVNREKVTDHHAILPTRSMLQADLEALPKGEQNVLKLIIARTLMAVSKPFRYLETLLTTECAGEKFTAKGKEVLEEGWKAVERKVLADILNRKQELTALPNAAENECGILNAELKEGQTSPPKHFTEDTLLHAMETASADSMPEGVERQGIGTPATRAATIEKLVQKGFLERKGTKKTKVLLPTDKGKALITVMPEEIQSPEMTADWETKLLQIERSEMEPETFMTEIKEMISSLVTTTEAAKGANALMKNKIIGVCPNCGKPVVEREKGWFCENRECRFVLWKDNAFFKRLGKRLDSHVADKLLRDGRVRLKDCKSAKGKTYNATVLLGTEADGRSKFSLEFEGGCMSYQLVVSEKPSVAMSYAKVLGATNRQDGYLEGNGYLVSWCVGHLVELAPPNVYDAKYVKWSIADLPILPQKWQYLVSASTKKQFGILQKLMHRPDVDSIVCATDAGREGELIFRLVYQQAGCKKPFSRLWLSSMEENAIREXXXXCPPQTVNMPKPFLTYEQQLIKLRDEKHIVITDETETLCKLQQVGYYSLVSGYKHLFRIPAQKIYKNGTAFEELVSLYEFDEALRELFLHYLLHIERHIRSLLSYYFTEKYGEAQSAYLLKTNYNYVRKHQQGIDRLVYELQKLTLTTQHSYIAYQRNTYHNVPLWVLVNALTFGTLSKMYFFFPFDLQSKVSKNFAHVNEKQLGQFLTVMTKFRNVCAHNERLFSYRSKDAIPDMELHSKLGISKECSLYQCGKSDLFAVVIAFRYLLPKQEFLEFKRALTIQIDSFLKSTTHISEEELLRAMGFPANWKKISLYRIMMKIKKFGALLVSAVLCIGMAAPAFAYEGDTTPVEEPVLPEIVEEEDAVTITDEETGALTPEGNLTLVDDYHTNYSDGSGQQFITMVSKSGATFYLVIDRNAKGQQTVHFMNLVDEADLLALMEEEAAEAYNAEKEAAKQAELDKLKAEEEAKKAAEEAAASDAEQPKENKVTKYAAAFLGVVALIALVAGGGFYFFIQQKHKKQAEKEAADPDADYTEDNGNFEIPTDVPDEDEAPDEQDTEPIMSEKLEKLRAMLEKEKERRIKLNNRIEILERRIQEAEAAEVNEMVRSAKVSPEQLAALLRQSANTTPNPAALAAVGATFDKEEDVNDEDMSKPKLNIKEETSAKKTRSPPKKAKVEQSVPKKKKLKTDADKAAEKAQHLRFGKAELTPDELSRLSKAQKREMYAAHAARSAVHREVDQYEDENVGVQALSEGEKAAGNVRDISKSRYARKLKKKAKMQGKKGTKTAKSSAREPTAPQDAGASGTGEGGSNWLSRWKQRQEIHKSYYAAARSGTAAQTAGGKAASNGASAARSSMEQAVEKGKTAVSTAVKGLANAAKSNAHVLVIVGVFLLLLLLVMSAFSSCSILFSGTTQVSGQTIYTAEDRDIRGAETDYKKLEKELDKKIKRTPTDHPGYNEYQYHLDPIEHDPWQLTSFLTTLYDDYTRSEVQGKLKETFKKQYKLTTWVEVQIRYKTVWVISPAGIPVPTQVPYEYRIFHTKLVNRGLEVVIREELDNDQWKRYEIFQDTLGGRPYLFNGGLPPGGSDGSGAPGIDYQVPAEALTDSEFAAIYEEAKKYVGTPYVWGGSSPETGFDCSGYVCWVYNQNGYDVGRTTANGLWQKSQHISEAEAKPGDLVFFKGTYDTPGMSHCGIYLGNGMMVSAGDPIKYADIHSSYWQQYLAGFGRLSKMIPFWKKNGKHSKPQSAQKRRQNAKPAVPRTAQQSIPMQRMFEDGTCRVKPNYYTRTIQYQDINYQLAQQEDRTAIFEEWCSFLNFFDSSIKFELSFVNMATDSTEFEKSIRIPYQRDGFDDVRAEYSQMLRQQLAKGNNGLTKTKFITFGVEGESMAQVKPRLDHIQNDLLNNFHRLGVQAKPLNGAQRLKLMHDMFDMDGASKFHFDWKDLVKSGLSVKDAIAPTAFAFKNSRTFQMGGIFCAASFLSITASDISDQLLKDFLDMDSSQIVTMHIQSVDQNKAIKTIKHTITELDRSKIEEQKKAIRAGYDIDIIPSDLATYGRDAKALLKELQSQNERMFLVTFLVLNTGRTEQELENNVFQASSIAQKHNCNLCRLDFQQEQGLMSSLPLADCQIEIQRGLTTSSTAIFIPFTTQELYQSGKESLYYGLNALSNNLIMVDRKKLKNPNGLILGTPGSGKSFSAKREIANAFLVTDDDIIVNDPEGEYSPLVNRLKGQVIKISPNSTQFINPMDINANYSEEDNPLSLKADFILSLCELVVGGKEGLLPVEKTVIDRCVHLIYRKYFADPCPENMPILEDLYNALLQQDEKEAHHVATALEIYVKGSLNLFNHRTNVNVNNRIVCYDIKELGKQMKKLGMLIVQDQVWGRVTANRSSGKSTRYYMDEMHLLLKEEQTAAYSVEIWKRFRKWGGIPTGLTQNVKDLLSSREVENIFENSDMIIMLNQAAGDRQILAKQLNISPHQLSYVTHSGEGEGLLFFGNVILPFVDRFPTDLELYRIMTTKLGEVSEGQKMAAYISVPRDLTKVKSKVAFNLTKRQLVCFGTAALIGVPLFFVLRDAGGNTAATLGMMAVMLPAFFLGMYEKNGQPMEKLLSYYVQSRFLRPKIRPYKTNNYYAILMKGGMTHDSVLEKERMETVLKAIADWIKGILTAGIMSNLSGLFDDVNTQVGNIAQQVGTKPSSFEPRVFAMIEALSRNVVLPIAGIILTFIACYELIEMITQHNNMAQFEPALIMRWIFKTAVSVWLISNTFDIVMAVFDVTQKVVSDSSGIIAGNTRVNDIGLSMLEASLMQMDVGPLFGLFLQSFFIGITMRILSIIIFVIVYGRMIEIYCMVSLAPIPMATFGNHEQSHMGQNYLKCLFALGFQGFLILICVAIYAVLIQSVAISGDAINSIWSIVGYTVLLCFSLFKTSSVTKSVLGAHMEFFNSAIEVLQTLVVALGAGLGVWGAINLLEGYGNDNPGSKSQGMKQLMAGGGVALVGITLIPLLSGLFGMTTKKLTKLLALYLPYILLGLVATNFGEAWRLAEGKELGDKIMSMMGTIPVAFANPLPSLHPLDLLVGLCCGAGLRLAVYLRGKNAKKYRHGMEYGSARWGTPKDIEPFMAPKFADNIILTKTERLMMSNRPPDPKNARNKNVLVVGGSGSGKTRFWLKPNLLQCHSSYVVTDPKGTIVLECGNAMLKNGYKVKILNTINFSKSMHYNPFAYVHSEKDILKLVTTLMTNTKGEGSGGDPFWEKSERLLLTALIAYLHYEAPVEEQNFATLLEMLNTMQVLEDDEEYQNPVDLLFEELAKKKPNSFAGRQYKLYKLAAGKTAKSILISCGARLAPFDIQELRDLTMYDELQLDTLGDKKTALFLIMSDTDSTFNFLISMVYTQLFNLLCDKADDVYGGKLPIHVRCLIDECANIGQIPNLEKLVATIRSREISACLVLQARSQLKAIYKDNADTIVGNMDSQIFLGGSEPTTLKDLSEMLGKETIDAFNTSDTRGNSPSYGTTFQKMGHELLSRDELAVLDGGKCILQLRGVRPFLSDKYDLTQHPNYKLTSDYNPKNAFDIEKYLNRKEKIHPGDEFIVVDADSLPSAMQEEIEQKSFNLMISTTKLSARTVLQAVKAAFRLYQSKASQGKQSVRTLLRQNRGVSSVEISKTGIRGLERYAKKYGIDYAIRKDTSEVPPRYLVFFKAPDAEAFQSAFKEYSASLLNKDKRPSVLARLQELVQAAAELPGKVRHKEQERGLGSTEHQRQIIDTFVNSVYVFDDRVVLNFNFTDDAKTVTREEVLGSSAVDNAPPNVRPFIMIFFFIIRHQNPNEKHHRHSAQNPRIKFYAKKSAKIGFSEPFCRSSPNFATDLLQTCYKRLKRGPPTRFIINMQKMRYTIRHFDLPLLTFEANMDSADTDLHIINVYEENRSFLPLNLTVSEDGVERWLRHRTIPKNRAYVDALLSKVGLSLNRPLGIIAANKGLSLNDCFWVDAEGSGDTFEKVNLYDNRFSQVLAAIAFTGYGSSIRTSLASCPEFSTNGMLPKCWRRQNGKIYLYKGGTSGFSNLGFEPYSELYAYQVAQVMGVNAIRYTLTKDLKKTLCSRCELFTSKEYSYIPIGQLVSKGGIKAIFAYYQTLGQNFVDALEDMLVFDAIICNTDRHYGNFGVLVDNKTNTIAAPAPLFDHGNSLFSLGGTDLWDNQKAFDEYARTLLPLAYDDFFAAAKSAMKPRHRAMLHKLLDFHFDRRATRYNLPPNRLKMIEKEVQRRARVLLGMGSYLNPGSKGFQESLNSEIYVDKTGLIEKTNAVLNTRQKFICVSRPRRFGKSMAADMLAAYYDRGENSASLFSSLKIHYVSSYQQHLNQYDVIKVNMQEFLSMTHSMDEMLTMLQKYLVFDLTDHFQNVRFRDKNNLIQVMKDIYAKTNRSFVILIDEWDCLFREYQQNQDAQKKYLDFLRAWLKDKDYVALAYMTGILPIKKYGSHSALNMFTEYSMTDPGELAEYFGFTESEVSALCEKYQMSFEEAKAWYDGYDLIAHRRSGDEHYSMYSPKSVVDAMLRHKFGTYWNQTETYEALKIYIQMDMDGLQNAVVRMLAGEAIKINTGTFSNDMTTFASKDDVLTLLVHLGYLTYNSIDESVTIPNKEVSQEYVNALSTMNWHGVMDSIEASRRLLEALWAMDADAVAAGVDKAHEEVSVLQYNDENSLSCIINLAFYFAREYYTIVRELPAGKGFADVCMIPHRMHLDKPAVVIELKWNKSASGALAQIKEKHYGNALKDYQGNILLVGINYDKATKKHECLIEKIQKMEKTIYHGSDHIIEKPKFGYGKPYNDYGIGFYCTQNPNMAKEWGVGIDHNGYANRYKIECDGLTILDLNAPGYTMLHWLTILLENREFDTSAPLAAEAKEYLMNTFHLDYKSADIIIGYRADDSYFSFASDFINGAISYRQLCNAMRLGKLGQQFVLKSKAAFEQLEFLGYETADSKEWYKKKAFRDQTARRQYLDVERNRRQRGDLYITTILDEEMKPNDPRLRMIHAYDKSYLSAAQKNLARMLDYLVNDLHYPLETAWQWFLISKMAFRFEQGDCSVLVGLSGVELARAVLEQAGEVVPMQKPSYAYDRSPEYWTGWALAYYQWLTSLRFAEIEQAVSITKVRLLYTPYHEMDVRQFADKMNELYRAAKPETNLKAMRTLAGLSQSELAGQADVSVRTIQQYEQRQKDINKAQAETLLRLARALNCNVEDLIEKVPPLNFKMFCENCGHQISDTAKFCSACGHPVGTAPSPGVGAPPTVPAKRESPRLKASSGNGSISRMSGIRRKPWLLRMPIPDPHTGITVVKTVGTYVTREEAEAVRAEMMKRPATPYQDSTLAKIHEIFLESREYKGRSDKARELYDLAWKYLKPLWYYKIAALYAQDFQNILDKMADDGLSQSMLEKERTLISKLYRTAIGWRVVDSNLASVLKVEGRKSPEREIFTDEQVTLILNQKNTPTGQMVIALLACGVRIYELLHFKHEDFHRTESGAYLIGGCKTEAGRNRIIPILDFGIPVFEHAYATSVENGPLFPNGKGGFWNEKNWRNRKFYPFLEEIGIQPNPYDENGKRKPEFAGKLATYTPYTTRHTYASLCDRAGVNKDILKRAVGHTPKSKTLDEVYLHPKATQMIEAFDKANQLVNDEVLTTTKAMIDKQQDFLTLTGAARRARSEGYDITYHSLRNLVAAGYINHVPNGSRIYVFYPNVIRFLQKGLTAEQSLDYQLSRARNMNIPDGFFENPVSPEYADLLSTMGAPIFFAEPPCCHSGDCGYIDCDGVLLHDQSLFFNCGYVVPPLNAQYEEVQPDLHSLERYDFSKEPDLPWYPMIPDFEIKVTPGSYEEVSERFKTYLRFRFGIDPASVFITGATGSGKSTASISLAIQYVKQGIPALAIDINQTMSPEHICKALSPEFESLVIRHNLYRKAVASDLITPKIYDGCIEDSYDTAYGLSEIISKGYRLGPTQAAILTDAIKSRVDCRETSLRIFPSILEELENSGLASARTLANRLRPLLRNNVFEFQKTGSTSLPLSPNIHVFDLSGYPAGIRIILAELLLYDWFRSARALQTPIIIMVDEVQNLKLGRGTVLNQIITEGRRFSIGSILISQSLKAFSSDEQLALSQTGTKLFFKPPLTELRACSEMLAPPQHRAETAELLKTLKAGQCLLLSEYVYIGDETHPCTDCIQVNVDLPQSVKMGTYQAPQVPQPGVTFGDERLVDPWAVTMLQNTCSNLQVQNMALQQENAALKNKSQSLQQQRENPLCKAANRAYLREFTAYKTESLVEFPDGRYYLVKENPLGEPYKFIKPVSDCTEFSARYAIDPRDGSTSIEVRYRLPNGTLSGFRVADDKFQQNALIQGFYKSGGTLRCGKDGPRLFYMLVAQLLSKHEIYFQPIPGWNINASRWFFKESAGCEAPLDSPILRPDALTSEDQLIMAAVIGLSFLKTRLPEDMQPTKPFAVISESFSITTEITLNCKLAELKKQLIHHRDDLLIHVRGGFASNRYQKATNYDYLSDEAEKGSASRSIYIVQAKELTPEIREHCIPIQLNSAEACSATTGVDSVTWGDLISLVEGNPNEFDSRVYRAYKEERDRMEGSSFCQEIAVLRAVSEIICWTFFQKASLSEEKVRDAYKTAFDHYPSRWDSMLNTTASDCFRNALYAAAREQTIRFRDIGDLDETYCKEKEVLYDEYKLYLTLDLVKRLVAKRMPEFLTSDVLAQLTEAGILSSSIVKTLTLSTGHSKNVRLRSINRSFVNGHGRRDITTIMKVEEFVNRIDEAEKVLKYTFRLNFAAAEDQKQGMPAEEVANQERGLLVEEAAEQAYRMFAPFVSDRWNGHPFLTNRVRLDELNKNLDIGILTEFHEKRKNMLIKDAIVSVYCMVREVVGEENRITVYASGEYAFFDEEAFVEEKEAEQDKKKKRKNLSKYITGMDDLLERGIYHKFGEGKNPLKVEKDHVEANRAEFLRSRNQPLKRSINGLDKKLAEVSGYKPFIKNKEVNVKGESVLREFLNISDLDVMAIFRRSSSRWNVVEKIEKSKSDNIGLDIERLQELNGLYKSLNQLESLRHMTAADKLYVQVQIEKVLNYNMMVCLWKNISELANSRANILLFDAESIETMSNCFKMNNVVCRAEIVNMEFDGLRDYKELQEKKENRTMDTWKTELQDVFGKTIARQNDEQDLFDLNRWKAVYKEDIDSWTNWAFPLFLSCFCVVLRKNIEENMQEKGQNVVCRMYNELSEYIKEKDVKLETRLFDENDMRELEQNTIMLKALSGYVTRAIETAQEIKVPITLEEIDTMMPKKKDYYLKYSKLQFLKRSEAVLAGGMSVIKFTIMFDYYDTLITPEEVADMLGCGMNTTYKLLKSGKIKAMRIGRVWKIPKRAVQEYIVQEAHMKATGWMCYIELKNDKYETSEDLKHLLQYILRLDKTAEDSQRANTITNTLAGCQPAMIPNEYLCDPSAVYNLMLFEVRRRQKGTTQFAKHRIVSFAATDCILPQDVVSLAERIASIYAQKGFITAYGIHADRFNVHIHFAVCAVSFQTQNMFHIQWEAERKMLVSVTNQWKSEFDEMLQNNIPMRQSREAALYGDDIVRYGSVPITAKGQMVQNRRAKIGKMDKFDEKVIGYDSIKETLRQIADVLKRPESYKEKGVSMPRGLLMESAPGLGKSLMASILMEESGRKSFVFRRINEGNTFLGEMKDIFDVAKEEAPSILLLEDLNLYVESNSPYAPEWACLQACIDETSDADIFVIATTNDTRYMPQSLLRPGRFDYILNLNPPLGKTAENIVSYYLRDKNLAKDVQISDIVKAMPQVSCATLETVMNLAAINSVYRDHAHVQKEDIIDALLKVVYNLRKADCEEDPQEHQMIAVHEAAHAVVGEVLHSGSIGIITIRGSHGAIGGMESGFAVYAKSEEEFQDEIIKTLAGKAGTALIYGIMDIRAVADIKKADQLLDIWLCHFAGGGFSGVEPSENRLSEPRLSYNEAIKSAKLEELYRRAYKILYDNRDFLLAVQKELLEHETLLNSDLAKIRESCTMEREKPTFDILGRIEQERLARSWSEYALAENSGLTQSTISTWRRRNLQPNVASIEKICAGFGITLSQFFQEEDSVYLTKEQKKLLDLWAKLSPAQREAVTKMLCAFLYIEEEPMTADTLKTPRVLELYQDFLSGKLINKQQAAEQYHVNVRSIQRDIDSIRDFLSEQCAKEGIVRKIEYDKKENSYRLVTQEIEQLSKGEVLALCKILLESRAFTKEQVEKQLQIILNLCVSQKEKSDIEWFIGNELFHYHDPAHAAVDPDNLWMVAQAIRNQSVLEIEYQKLKDRQIVKRTVEPVGLMFSEYYFYLMGVITDHSTREAFHKKNDPYPTIYRLDRIHSIKETGEKFSVPYKDRFKEGEYKNRTQFMFGGEPQNISFNYYGPSVEAVLDKFPMAKVVDEKEGVCSIEAEVFGTGVKMWLLSQGSKVKVTAPETLVMSRIRIGSFNVRNLADGEGRDLDRIAKMINYYHLDIVALQEVLAEGKVIGGIDLKEPSGQAKAYDRSLKRRLSGPWDSQWAQPGLSRENEPFRGEDRRGEGYAILWRTDKFDLPLGRWGEPYRPEILSNYNPVIAESQLRLIRDPLYARFLLKDRHVAELRILVTHIVYGKSGALNDVIDYSAAKMRQKEFDILAGQLYRRVAEYYKVQDCTSPYTVLLGDYNLNLGAYPAVPAVACFDAKGRPVDESRAKAYIYTYQTDASTIKRDTPEYANNYDHFSFDERTRRIVRMDSIHSIDLVNKYTKSEDVTQEQRFDRYRKEISDHLPIMMEVDLMQKLQVYSEDEKRKAAYALNLCTVSISQIVDYNDVYVLEQEYNAILNNLNLEAMPKDEALLKILVETLNTITFFRIQELKKQKVESDYQRRMKNAIWSAVPNLSVIVAGNPIAMVLSVATQVGTAYMNYRREKANAGIEKENSEFELQITAMEQFHALQRELFTTAWRLADSYGFKDEWRLTENQIKQYDQVLMDADEYRKYARLEAIAPNFEAYPPFWYFYAHTALYISENETNAVAKAEYRNRAKNHFEKYYQLNRFSLLREDQLAASALLEYSDLLLLENAKENTEKVYQLVMEAQKKAGNANDVLQLCAISYLKIGKTEDAARLLKYLVNEEYNPAMNAKILSRIYVSQYLATESPAAYTEYGILARRIAPEFLFPMPKGTVSDQSLEEAFIKRQKVALIKAYRTTLQDYARKARDDYEDALQDLEKSCYKEENIALWISKLGTGKYSRNCVVQLNRMVAGLDTLPVFRDLEKREVLIKLIEGKLRNTRPAVQNLQKETTNTFDEEDYEKLTELFSYQRLTEVFFDKLKARVTDEIVNSQELGTLNLLENDLLQFCDAQELPMPQCLNLTREEQQLPEEKGSLYFDDVFLEDALDPETQEQLEKKMEKVIGAAKGHIIKDAANVAIYLRTEKLFDFYFENKKLTGATKYLVKQKAAAVIDDKTNKDCDLILTVDGVVIVNQNRISNEKIPYDAIKFDSEAGTDRLTTSYKDVCDNVAIDIKGLYALMQELDKLAMNRKNKVDIPDDLKTKCNVIIHGASTASAAACAGIAQIPLADNAVLAPIQIAMIVSVAKVFDQNIGEGVARGLLSTFAATFVGRGVTQVLFGWVPFMGNALNSATAAALTEAIGWMAVDHFAKGYQLDQFEYEETSDRKREAEQKKTADEEELDIDLWKKDFEKRARAALEKNDPVELDALVSEFEKMEQKLPEDDPLRELYDKLLEARCMDEQFVHEDQMRNARTQGVGSMVSEQNRQNALELMRKMHKIDTQNAAAKARIENNLDKALQCVDNVRDFVNAPNHVLGNPSTKHGEFAEQVDINFHNADQIMHNRRPDASKEGVVRNAPQDYYVNGVAVQSKYCNGANNSLGDVVEHLKQYQSINFGQDGSYYVIPKDQYELLKRIRKNENGQYELIKSTQKNDTENISQKTIDAIGKKLEEIKALSGGRELGDIIRPGETDYAAVQRGKIMETLDKKSDQLNQTADNQKQRADERSDKKREQAQQEAAPSLQKAGKAAAEAAFISGGFQLAVGIYSKCKEGKKINEFTVDDWKDIGIDTAKAAAEGGISGFAIYSITNFTSISAGPAAAGVSLAFSVSELAYRKSTGAISDEEFKESCQMAALNAAVSAVGAAIGQELIPIPLLGAWIGSFIATQGLERLCDEGFHNALTMSAYEVRKMTQRLEYGTARIAYSSAYTNQAISQAQTLHEETQTLLDDFNRKKRMTKEQCSLQPNYYGSSCDFQDLQSAVQQLTTKSDAQFEELKNEKWFHRIFNMVVCPRKNNIRMAEQITSLAQAQGILIEILVRLADQDANIAGMVMQSQSDIRALAQNSAYLQERLYLLEDKSYGIKENENLKDLNGQQRNILSGCLNDASKLYAMPSNEQRLYANELLNYLQADARVENLEDALDDLEDNTKRKILSCIITYMYLYDHTTESMEQDEQEDFIDLFDLGRKTIKSLKQQTVDTYRLRGVDGCIDRYITAPIEITEETPFEVELPEPKAAEGASEAQAEENGEEAIDTNTSREKLVLSGSIQNDGETVYKNKDIHFSSAIMNCKGTVKFINCTIHYNEDSGSHIYLNNETELSIMASTIICHGDCKKGNYFIQGINRAWAKNCTIKNCIFIDCVGFIGCGCITFCFDNNKVQGTCSEFFSFGVKEEAKISNNHFVLPDKPTFEFRDANDAIATNFIYCGGKNVFIENNIFECEKSINASSYMVENNIRVIKGSAWIGYDEETDKGTVSNCTFVRMNKCIEHIGTVKDCIFEKCSEAIIECGFLITENRFAECKNAIVNLCSRATLSNCQFIDCAGKELVTSRWNSQVTIHDCEFSNVSLSPVNSVEEIEQIGELCLKNYIRELIPGKFSTLDTKGVLIEIGGVDKKFANSNRPSKIERCIFNGVHICSEGGFACNMGKWKACKADRNLTKDQMNFLISVYTANYDKFNYPRVIVSDCTFKNCASVHQEIINTEPYDSVFGSRHNYTAISVRNNYGLDNIGDPTSYVKSSDVKLKETDANGNKIGSSLSVNMNRQNHSEPENRLTQEEQQEFIELLAQLSPEQREALKEVLKSFTMNIYGYCRISTAKQSIDRQIRNIKAEYPTAHIVQEAYTGTSIFRPEWLKLYRILKSGDTVVFDSVSRMSRNAEEGFTLYEDLYHKGIRLVFLKEHHIDTETYKKAMSGSIAMTGTNVDFILKGINEYLMALAKEQIKLAFEQSEKEVADLHQRTREGLLTARLNGKQVGRKKGVGFETKKAREAKQIIRTHCKTFGGTLDDADCMKLTGLARNTYYKYKRQIRAELIAAQDLPKGASIFYEPPKSFMTFNAMTEHYEEITVCGKPALFTSIRIKRDTIPDGLYAYDVRHDDECRGIPCEIAPFVMVNHWGTIILAEPLELPDDGRRYIDEDTDWNYAPLDGEDTANHKPCTTISDFMTAYAHMKDEKIKVLALLPMELPKEIELDNTLEAMQKFVGGLIECITLSDTGSEVTLVCNDEGKLLGLPLNRPLWDGADVLAGPGFLAGCDNEGNLTSLPQSTMDFYKEKFRAFIIEIMCDVLDKVENRCIAKGKAEGEDTLALLMKKLFDQNRIEDAKRASEDKEYRARLMKEFGISMKDLQFPVGISNFEKIREGGYYYIDKTNLISELLSGGIAEVTLITRPRRFGKSLGMSTLANFLDIRKDSKQLFEGLAISKNTELCKKWMNQCPVVFFSFKDTDGLTFESAYGMLRMKLAFAFQDYQFLLDDAAISDDDKGIFKRILGRTASIDETKSCFLLLTRMLEIHFKKSAVVILDEYDVPIAKASSNGYYSQMLDVMRAMMSTTLKDNTSLDFAVITGCLKIAKESIFTGTNNFVSDTILSPRLSESFGFTQADIDQMLKDADLESQSAEIKAWYDGYHFGDADIYCPWDVISYLRDFQYGVAQKPKSYWKNTSDNAIIRSFIDYAGDNITTKLETLMAGGSIVQHIEENLTYDYLHSSEENLWSVLYLTGYLTKVRDKDLTDSLPDGCSALMIPNAEIREIFETTVSKWFDDSAKAWNRSPLFDAVWSGNNEALTKEMTKLLRMTISYHDYREDFYHAFLAGIFTGAGYVVESNKEHGEGRSDVIVKDIRNGRVAIFEAKYAKTLDALPDACDTAIQQINDRMYAADFRDDYDDILCYGIAFFKKRCMVRKKMENPFVKLFAIDFKDHLEVKKSGSTELKYVSWAYAWAEVKKLYPSASYEVKKFNGLPYVYDPITGFMVYTSVTIEGVSHEMWLPVLDGANKAMKAVPYTYTTPKWDYNPQTRRREKVGMEERTVEAASMFDVNKAIMRCLVKNLAMFGLGLYVYAGEDLPEDAAPQPESEPQKQPKPKSTSQKQEQPPVPCICARCNQPIKRVKLKDGSIMQAAEFAATHEGMCADCYKATRLNVAMVLRKSYLDKIIPFIDQDLIKVLVGIRRCGKTVLLGQIKDVLLQRNIPAQNIIQANFESMRFRNTRTAETLYDYIAEKAEGCTGKIYILLDEIQEVERWQIAINSLRVDFDCDIYLTGSNSKLLSGELATYLSGRYIQIQVFPFSLAEAKQQCIENGTYTSDEKLFADYLKYGGFPQRFFLPDDHSITTYLDDLYEAIIVRDIMLRHNIREQTALRNVLAFLLDNIGNPFSARNISGRMVSEGIKTTTATVLNYVDYFKEAFILLNASRYDIKGKALLSSTEKYYAVDLGLRNVIKKSEKLDSNKLYENIVYLEMRSRGYEVQVGKLDDTEIDFICYRGDEKLYIQVAYLITPADEEREFGNLERLHDNYPKYVISGDLANLSRNGIIHRNIIDFLLNPMKRLISTLNLSKEDWLRYRKCGITGTDAGAILGVNPYRSAFQVYCDKNSETIENIDNEAMRQGRDLEDYVAQRFTEATGLKVRRANAIYQSEEHPLLLADFDRLIVGQKAGLECKTVSPFSADKWADGKIPAHYMAQVNHYLAVSGFDCWYIAALIFGKELVIHKITTDKEVLNNLIAREEHFWKYNVMPEIPPVPTGSEGDTQQINQLYSADDRNKTADLNPIRDLLDKRQELSDQIEQLEQEKASIEQQVKLEMQDAAYGTAPGYKVSWVSSESKRVDSQRLKKEQPDIFNRYSKNVSSRRFTIIHAAMNDVNNRIFKEFTEFFDNVEKSASEISVTMAYEITMKSTISTAIIVLESEGRLEERYWNHLRVQNNILDFLYDLWVGSCHSLAADFSTIMKDLVEYDFILAESIMKERMQSAMPANVETMFSVRETPWHGLGRIIMDAPASREALEPAGLDWQVESRNIYSGTGAMIPGYRANVRSTDDAVLGVVSDRYRIVQNEEAFQFTDDLLGEGVTYETAGSLQGGKKVWMLARLPRKYLIAGDQVVPYLVIFNSHDGSSGVKVAMTPIRVVCQNTLNLALNTAKRSWTARHTENVLLRVQDARETLQLASNYMVELGNRGEELARIDLSDHKVQEFINEFFPISEDLSDCQRKNNLRLQEELKTRYYNAPDLEWVGKNGWRFINAVSDFATHADPLRKTKNYNENLFLRTAEGNPMIDKAYKMVLAAAMNFWSEIVKEVGTVLVEVLVRIAEEMENNDMQNKKPPFTITEKILTDVMEICELVGKVSSTQHLSSDPVLRRQNRIKTIYSSLAIEQNTLSLEQVTAVLSGKRVLAPPKDIAEVKNAYEIYDHLNELNPYSVEDLLLAHHVMMRGLVQEDGVFRSKPVGVVDSHGNVLHFGTLPQYVPPLVEELLKWTEDSPLPMLIKSCVFHYEFEVIHPFADGNGRIGRLWHTLLLSRWNPLFAWLPVESIVHDHQQEYYEAINTSNAQGEGTAFIEFMLSVIEEAFLSVIPENFEKSMMPTSGKENRWNILEKYLKKEKIIHNSDVQQLLEVSSATANRILVSFVKEGKLERVRDGRYWAYQKLMQNTNRAQESGYKASLTREQFLFHEMRIVAKQMVQGEDLASMIQIIATNNLFQYPTERMTAGMVRACYRRLNLLNSEQLLRNIAEHSVEEAKQICLYAIMKDNRLVWDFMVTVIGEKYRNQDFSYGKLDMTSFFIRLQEQNDAIADWSESTVKKLKSVLNRILRENDYLDSIKAGHLNPVWLYPELENVILTNGDQAVLPAFNRFEMGDIQKRLDNVRQMIQSQDFLEGKGLSNEVNIRIFCYEPRDEMAVRHFIEQLSTDLTLECQLRICNLYQIFLEICEDMDILDAIPDMEEEDGHDYLLEQLQSTIGVDEIVQKIQSEPFQPGEVLVLTGVGEAFPFMRIHTLLEASLFAERPVLVFYPGTFNDQQLRLFNCLKPNNYYRAFNVVMVIQNMFVEDINRKINGVVKVDEDENKVLEQELNEYVITRELKRHFADFFNTYAEAFDEPTADTGVWISGFFGSGKSHFLKMLSYLLENKEVNGIRTVERFRKKFEDDPGTFMQVDRATKGETETILFNIDYEGSINKDKTAVLRVFAKVFYNHLGFFGSNLKVAMLEQYITQQGKMDEFCRLIEEKKGKPWTEVRKAFAFNGKFIKPALAEALDISEEDANNWFNDKSATELSVSQLVEDINAYVSTKPANFRLLFMVDEAGQYVGTDTDMLLNLQSLVEKIGSECRGKVWVVCTGQEAIDEIIKVRADEFSRIQARFKTRLSLSSSSVDEVIQKRILKKTPEAERTLDAVYEKESSGMRNLFSFTNAMPDIKGFSGPAQFAEDFPFVPYQFLIMQKIFVEIRKHGNAGKHFSGGERSMLSGFQEAAQKVEKQNEFALVPLFRFYDTVHSFLDGSIRNVIDRCSKAVENHDGLEPMDVDVLKLLYLIRYVNEDIPANLDNLVILMADDIRLEKVAMREKLRGSLDRLIGQNYIGRTGDTYNFLTDEEQDIQKEINLTQVDTGAIVGDIAKIIFGIIYDAKKFRYGKCDFPFDQMVDNTMYGIATGGMRLRFLTAASDATEKTEFRLMNSSKGSEAIVVLGDTPYYESLEASMKIRKYVKQRNVSQMPKSAQDIIRGQQEEAAKYEAEASKALVEAIENAKFYADGEHLDIKSGNAKAKIDQTMEYLVSHVYSKLDLIGKNADTDAEIMAVLSGADVVFAEADPNRDAEAAVEEYLEMQAMKHLPTSMADVQSKFSSIPYGWKEIDIAYVVARLIVNQKVTIKYAGTTIQPDNAKLPDMLRKKSEVGKTSISKRVVVSATKMKAVRDLLRDYFDVMDVPADEDGLVKFIADEFGNQLQHYNKLNEKYDDTHKYPDQTIVHNAITATQEVLNQKKDNIALIDYLLKKEDDLFDQKDAMGNVETFFKSQVGTFDDAARLEHEMQADLDRIAQDAAAYEALNKIRLIITVPSFGQKFNYKRIPELNGLMQTVRTAHDQMLDDKRSEILETVRQCMEATHTAANGDPKALDIVRKSDAFFDGYKAKIASCKSLALLDGMIIPLSQYKDETVSSIEIALAPPTPKPVVTKKDVNIPAVKPKKVKSYSRQILFPAKTLRDDADIDAYVEKIREQLRNLLDGCDEIKLNMDKTEFPKIFISYSWSSEEKVLELAKRLCSDGVDVVLDKWDLKEGNDKYVFMEQCVTDPEIKKVLIICDKVYAEKANTRKGGVGDETVIISSEVYGKAKQEKFIPIVFESDENGIAYKPAYLQSRIHIDLSTDDLVKYEAEYEKLLRDIHDKPLYRKPPIGKKPDWLDEEKTSLSPLTNLIQRIKGAVVLKKQQDAVLKFADTYIETLKTFRLKDNTDAKAIYEQYIATKGARDLFLDFLSVLFETELDTVDVLCEMFERMHNTLTCEYGYNSSACQARSRDYEIFHILIWELFICTIVYLRYRKKYDVIYGMVSNTYFLTNGSLDNNPKAGNYCQFQYYSQIIEEEYKPTTENRNKYTLLGHTLCNDREKLPIYSKESIAEADIFLYQICNAYELEQSQNQWRDLYWFPRCYVYARKGPEEWAKMKSRRFCKKIYDLFGVTNLEELKNAVSKCTFDPQMKYSGFANPIPAILSEISLEEIGSLNMDKNAIKKYAVWARKELISRVAQKAQQYGITETEMVDAGADSVNGKVLSAEEMQQRRALIVQINEKGYQQVMEEVAYTWFNRFSALRFMEVNGYLPSHVRVFTDENNAFKPQILAEALHLELDKLDKDKVYALKETEQTEELYKYLLIVQCNALNSILPGMFQTIADYTELLLPDNLLREGSVIEQMISQIPEDNWQDAVQIIGWLYQYYNSEKKDDVFAALKKNVKITKENIPAATQLFTPDWIVRYMVENSLGRLWVEGHPDAKAQLLPTPEEQAAYTAGNRDPEDTKWHYYLEEAQQEPQVQAQLSEISKQYADLTPEQIKVIDPCCGSGHILAYLFDVLMQIYENYGYTPRDAVASILQNNLYGLDIDDRAAQLAYFAVMMKAVRYDKRFLKRKDEDGEPDVPQPHVYAIEESNRIEKPDVEYFCNGKPELKDAMHTILTQLYDAKEYGSILTITPQDWDALYARFDEVADESSFHRESIRKKLLPLVRVAQTLAQKYDVVVTNPPYMGASNMNSDLSEYVKKYYPDSKSDLFAVFIEVCSRMAKQNGYQAMITQHAWMFLSSFEKLREKMMLTETVSMAHLGARAFEEIGGEVVQTTSFVRVRTHIDNFKGVYCRLIEPTTQQGKEGMFLACENRYIANQDNFAKIPGSPVAYWLSDKSIAAFEKGCALGTLENVCGGLTTGDNNRFLRFWFEVTLSSISFQTNSMEETEKSNFTWYPMTKGGEYRKWYGNNEYVVNWKNNGEEIKYWVTHNPKDPNTKQWSRRLFNTESYFKHIITWSGISSGAPSMRVASHSIFGSGAKAIVSERKDDFYIGYLNSSVALMYLRVLSPTLNYESGHIASLPIILAEDEGISIVVQKNIDLSKQDWDSFETSWDFTRHPFIKAITKYPNMMDIGNIYLAECYDIWAGECEERFEKLKANEEELNRIFIDIYGLQDELTPEVEDKDVTVRKADLGRDVRSFISYAVGCMFGRYSPTYDGLAYAGGTWDDGKYNIYKPDADGIIPICDDEYFEDDMVGRFVEFVRVVYGDSSLEDNLRFIANALGGKGQPKEVVRNYFLNDFYADHCKIYQKRPIYWLFDSGKKNGFKCLIYLHRYQPDTIARIRTDYVHEQQARYRTAIEGLEKQVAAATSTSERVKLTKQLNKVQAQDTELHQYEEKVHALADQMIKIDLDDGVKHNYEIFKDVLAKIKMKQKVLKGLKIVTRWLACAKSALVLGVIVALITWGMPLATPQFVAKVNGLLSAFDGNTDVVSLMFSSVISFVGIFISALLVYIQVYINRFPSELVLNQIKPRYANFGTAIALYLFFCVVEMVVKMGRFSDAVLSVCGVGIFIWLFYFAYSLHYKTSLTECTRTYVKDILNTESLLEDSKALKAKLKILEKTYNECVARNELYVCQIICEESNKVFLESMKESQTSIINGDSKSKQISEAMDNTFEHSISLARDTEMTADRKTQTTAVRNVVSQLTMCIKLGMMDQYKKYTNRLMGELYFLCKSENGELQDRYYHALMEIVRISVESKNSQEYLKCTLTSMKSNAKYFGYLSNYDMSDGYLFLLGYCIEKDMGEEYIKDFVNFLKSATVVMPDFEKGNRSIEIVRNTIFTVLRRNRKAEIYIVIDSLDLIRQFAIKSEKWTILAIQIFVEFENENFKDYFEISFEKHVNLLTSIQESYSDKFLRTLPHPNFKRFLGESENRIERVQILKDSFIQLMREAYRLDMARMSYQLFYELQDCITDENITEATRESLMEIYFIVIEQSLMSTHEDLNILMLSWMQEAIEILDRKKLMSENLGEEIINIIIDKITQTGMNEDVREYLLGMISGWSIRFEKGNPQNFVLINKQIRVLLINGLHSVGLFSLETLNIALLKNISNDLGWMLINALQQDYPEVQLLLDSVIDLYRKSVIFGVAFNVRIYLLTLFTTVGAFCQTDSKYNPTGDAVISFLKEIPHDMIDLAIDVRKNDYDGWDNDEFGNIKNGVAILKGKLATMETDKIVLDLNRRFAVPLPEFYERRIIFWHDEEKEYADKLDEIRLENAKLVALTGSNTFAVKKMLSVDDLTSNYVVYCPISYERQEDDWLLDIELYSESYRTDAVSNWMQELDILDNPSMRKLVKHYRKFFGAQARRAKIMAQDKIPATPAQLHMAVMAALCGMKKAQPNEILLNVLRGGLDKAQNPIYQSFVDYSAEEAFWAMVRQGCGYAEEEPDLGQLAIHLLLTASTRTLRPEFLAGLEKFLSIPHQAYCYELVSEWLHSDDLQQLYDVARYVEDEAHLPQRLEKLTVDDLATTECFPCINEIILSKLMTEISDHIIDVDVITKTVEKRRTCVWYEYFRNFYEGLLQVANMQEFFKEHSAGFHTPDAKQVWKEYAEDYYRMDTYYRLFHLSFQRSLETSNIKLDDLFKHVVDKVEGLYSYWFLGGLGKNWSDVCADEMAEHGRVLEIPQQSDFYNEHIRPADSRVFVIISDAMRYEVAASLADELRRETQSNVKLGSMQGIFPSITKFGMAALLPHKALTAELKNEVLNVLADGQSTASTNRDKVLKGVNPASVALQYKNIIGMKRAERAALVKGMDVVYIYHDTIDEASHTSDTSVFPACDRAISELKNMVRIIVNDFGGANILITADHGFLYTYSPLTEDDKVDKTSFHDMEVEYGRRYAIMQKEADPQYLLPVKFLDGKTEYTGFAPREGIRIKMNGGGLNFVHGGISLQEMTVPVIEYHYLRNGSMEYRRNKQKYDTLPVTVSLLSSSRKISNMIFSLDFYQKDAVSANREAATYLVWFTDEYGKPVSDTQKIIADKTSENGADRTFHCNFNLKSMKFSNTATYYLVIADEQGQQMQQREQFQIDIAFAIDEFDFFNMEPNAENSCRRDAIKKKLRQNFDGKIVRKDLTKKIKEGANVPAYVLEFLLGQYCSSDDEAIIEKGVQNVKHILADNFVRPDEAQKILSQLRKKGSHTIIDMVTVHLDIKKDCFFAEFSNLGLSNVPITDDYPEKYDRLLCGGIWCIVQLEYESEGDSSFGMEDLDSEPRQKKQKDVSPISIRKLTPIQMPHIDIEEVRAGRKAFTQDEWMDVMLRSCGYEPEQLNQREKWLLLARMLPLVENNFNLCELGPRSTGKSHIYKEISPNSILVSGGQTTVANLFYNMGRKTVGLVGLWDCVAFDEVAGIKFKDKDGIQIMKDYMASGSFARGKEEKAASASMVFVGNINQSVDVLLKTSSLFDPFPPEMGTDTAFLDRLHCYIPGWEIPKFRPEHFTNDYGFITDYLAEFIRELRKEQYGDALDKYFRLGKNLNQRDTIAVRKIVGGYVKLLYPDGEFTKEQLEEILVFALEMRRRVKEQLKKLGGMEFYDVNFSYIDLDTFEEKFVSVPEQGGGKLIPDGMCNPGQIYTVSRGKSGMIGVFRLESQMLPGSGKFERTGLGSDRDCRESTNTAFNFLKANGNRISGGISTASKDYIINYQDLQGIGMTGKLALPTLIALCSIALGRPTVSTLAVLGEISISGTILKVDELANSLQVCLDSGAKKVLLPISSAVDLGTVPPELVGSFNLIFYSSAEDAVFKALGVEMKTNDRKITDLMATIHTGKTQLPDFQRGWVWDDGRIKALIASITNGYPVGAAMFLEYGNESIHFKSRVVEGAPSADKVIPDELILDGQQRLTSVYSSLFSEKAVRTRTDKGQEIERFYYIDMVKAVNSTVDRVDSIISVPKDRKITSDFGRKVELDLSSASQEYAQNVFPLNIILDPSKYSKWQMDYMQYHQYDSNAAKLYMDFLSKVIVPLGQYTIPVITLDKDTPKEAVCQVFENVNTGGVSLTVFELVTAIFAMDNFELRKDWEERQKKYFSDDILSVTSATDFLTACTLLSSYKKGGTVSCKKKDVLNLTLAEYQRYADDLTEGFVEAEKILQEERIFSSKDLPYTTQLIPLAVLCTLLADHNRIKTTSVKDKIKQWYWCGVFGEMYGSANETRYVYDVVGVMAWLEDACKTPKTVQEFYFNPVRLLSLQSRLSAAYKGIMARILKNQCKDFISGREMDFTVYKAESIDIHHIFPRDYCEKKGLPRAKWNSVVNKTPITYSTNREIGGVAPSQYLTKIEKKGQVEPDILDGYLKTHLIDTGDIRADRFDDFFIKRSTAILNEIEKATGKSISGRDSDLVIQDFGGALLMEPMKATSVNSRAEELFVQLFCEAFGPEKTENLQVQYPCVDIYGRHRYIDFALESPESKIAIEIDGETYHNPSKVSENKYADDLLKQNSLIYDNWKVYRWIYSQLEKQPEKVKDELITFLGTSPMFKAFEADLPVQMGQTIELRDYQQEATENLQKMREDGKTIALLYHATGVGKTITAATDAKAVGGRTLFLVNALKLASQAKETFAKVWPEASLGEYTGSQKDMTQTVIFATVQSISKDLEKFSPTDFDYLIVDECHHAAANTYQKIFTYFHPKFILGLTATPERSDGEDMLELFQNVAHKMDLKTAVERGVLVPIRCIRVKTNIDLTDVRINGIKYNSQDLESKLFIPERNQLIVDTYLKYVNGKKTVIFCASVDHAAEIAKLLRDNGVKAEAVSGRDRVEVREKILKDYETGSTNVLCACDLLNEGWDSPHTTVLFMARPTMSKTIYLQQLGRGTRRCPGKEDLLVVDFVDNANMFNMPYSLHRVLDIAKYQPMAYVLAPENKRKLDQDMLFQGEKPEAWLDVPIDVSDYEIIDLFNWQNSVKDMISQIEFVRMVDIQSETVERYIKDGKVKPDLSIPFGDKRMFHYFREESIRNIAKQYGWDLITPQNMADKFMKFIETMDMSYSYKPVLLKAIYEYMDTSGRVALPDVVDYFIDFYEDRKAHGMIAEKSTSIYQKGGYTRKDVEKNILSNPFKRFEDMRFLMRCKDVETIEVNPIIFRKLTREDWLHIVDVCDKSLEKYYLRIKKMHHRSFGDGVITEQKKTTIVVTFRDGAKMFSYPGCFQTYLKILDTDLKEDVQEVVSQHEHAETAERKQRINELQTSISSNRRQEKDKSVQIKPFASVADFCQAYRMALSAEISFIRMTGGKHILLQEGKRIGRDNGQFVYLLESEDELNYPEGTPVTIWKGQSQISGKILNCEAFSVYLISELDLGAEVEMLNISAEACYLLQSVSERLMDLSLEPSEIAQDLICNGLKEIDYRNSDIAKGQETAVRMSLEQPITFVWGPPGTGKTQTLAKIAWAHIDKGERVLMLSYSNVSVDGAILRVTSLKNDVFPGQLVRYGFPKDKRISEHPYLSSYNLAINNYPDLLKRRTQLQAEKKRLEKNDPKLIQVEKELNEIRRELRAAESQCVRNAKFVATTVSKAIVDKEIRNGAFDVVIFDEASMATIPQIAYAAKLARKNFVCMGDFRQLPPIVQSSKESPLNADIFQYCGITQAVDQGSNHKWLCLLDTQYRMHPEIADFAGRSIYNGLLKSANRMTEKREKTVMAEPFAGRAMEFVDLSGTMSTCIKSSDDSHANVLSAFVTFSLALKAAQTQEVGIITPYHAQSRLLHAMVRDVNELEALPHAIKCATVHQFQGSEEDVIVYDAVDCYRLPFPGALIASTAGRYADRLFNVAMTRSKGKFICVANGSFMRNKGMSENLMFMQMLKSYRATAPMIPEIIRPNDDLEKYYFDFVEKENQVDEFIKDLATARREVRIDIPDSPANSDINTTRIAQALAEAQSRGVKVFVRAESKKNLHPTLKYFAVENHYLTDPIALIDKTVTWFGMPESAACFKIEGRTSAINNRPCIRFWGTHTAKILYGLLEMSQVMDQAKTVEKDAQGNLITDKLSDYVLAHKKCPVCGKPMQLKKSRNQKYFLSCSGYPSCKHTEFVETEFVEEYFYHKGNKNGMLCPRCGCSLEAKISRYGIYVQCCGGKRHKYGLDEIMGKATVYCIMHTERCVAQVSTAGECKIYFEDFMPYGLVLKESNDFDTRINNVISFHSWCVSRLIPRDRTYAKEILNSIGASQSVTDRERAQIALSYHCLSLLDVFWVKEEKETVRFEDINLYTHSLSNALVDIALRGHQMAVTNAHLLANDLSTGGCYPKAWVRKEEGFYLYKDGGQDAVEREVLASKICRCFDCHQVLYEQGMFENEPVSISKIMTSQRYSLVTYAAYDVYCTNHDWNTLDKILELDAHGYYMMNILDYLVGNTDRHWENWGLLMDDETNQPIRLHDLMDFNRAFQQYDTLDGANCLTVGKRHLSQREAAIEAVKKIGLNQICEIESRILGKNKQQKVIFEQRKKIMEGCRMDLNSTLFYKAKFDIEAIYPDTDLLWKLVCEIRNWMGKKWEKRGETITDDSHCWTTFKFGREFSSKKESVHFRSVYHHGKDGSTDWACKIVESYPSKNGCAPREWTTEIGFQQVNTQRATISLVLYYNDRPGFIGPCEDNPPASIPGIVWRLCTGRGIRCLVDNKRFSMKAGHLNPGDFPEFWKIICNEYREVPVVYISPKRVDESDNGENLVDPQKLVEKLGPNALVYYANDMDFCREMTLLCKPEKFGCYSGNVRIYLPHPHVDDVADSYRHRMIYARDIVDNEEDIYGMLRRALAQDVHFYEDMFRVEDCKKLNERDLAEIRRNEYRQKIEDELLEINAESDAKRQNILKEELEKIENERYEWERAREEYEDNIKSLKEKNHRLQIQESNRQQEVQAETRNMMEKIREFPRYPKTSEEIADYFERHFPDRVVFTKRGKASLQECTTAPEILWDALYQMVTKLYDLYADKEVKSVENAFNSISSLHMARGEGMMTRKDSTLMRQYEDDYNGKIISIEPHIKTAETKESSPRFLRVYFGFDEESKKIVIGSCGKHLNNYTTRKIMFIERDLRGFPVFACFPDCCAKANIPGAKTPESKTPCVMKTLEKVSDFVGKYMAAIVIVVAALSLLFPGTFSVVKTAWVNTLLGIVMFGMGLTLKPEDFKVVFSRPKDVIIGCIAQFTLMPFLAWALTQLFHLPTELAIGVILVGTCPGGTSSNVMTYLSKGDVALSVGMTAVSTVLAPILTPLLTLLYAGQRVDVNPVNMFLSIVKVVLVPIALGFVVNHFFHAFTQNAVRVLPLVSTTAIVLIICAVVSANSAKIMTSGLLILAVVILHNLLGYLTGFGVGKLLKLDSTKCRAISIEVGMQNSGLATSLAAAHFAQYPLATIPGAVFSVWHNISGAVLANFFARTAEKKDMAVKYSAMTRKSTRKECCRELPVWCKAVQGVRGKILSELSGMYTIKTLNAISPVGLAKLPKNQFDVTVDADAPDGILVRSADLLNTTFNDNLLAIARAGAGVNNIPLDRCSEQGIVVFNTPGANANAVAELVIGMLIAGSRNVAAAAQWCQGLAGDPAMSKSVEKGKKQFVGNEIKGKTLGVIGLGAIGSRVANCAIELGMEVYGYDPYISIEAAWNLSSQVHHCVNLNDMLPLCDYITIHVPYLPTTKDTINAQTLALCKDGVKILNYARGELVNTAALLEAMDNGKVSGYMTDFPSEAILGRPGIVCTPHLGASTPEAEDNCAIMAAQELSDYLRNGNITHSVNLPEVHQPRAGGKRICIIHKNEPGMISQITALTTEAGLNIENMVNKSKKNMAYTMLDATGAVDARLSEKLSSIPAVIRVRILMARVYNFSAGPSMLPEKVLRQAQAELLEYGDSGQSVMEMSHRSKWFDAIIKDTEASLRRVMNIPDNYKVGFFQGGATQQFAMVPLNFMTTGKADYIVSGNFSGLAAKEAAKFGEAKIVASSKDKNFTYIPDVNAIDYDKDASYIHICQNNTIFGTQYVELPQVEGVPLVADMSSMILSKPVDVSKYGCIYFGVQKNVAPAGMAIAIIRDDLLGHAADNVPTMMNYTTLLAKDSMYNTPPCWCIYMTGLVLKYLENDIGGLANMQKINEAKAKVLYDYLDGQEFFTNPVEHRYRSTMNVTFTSPNPDMDKKFCAEAAEAGFVNLKGHRLVGGMRASIYNAMPAEGVDKLVDFMEKFRKENAMYGLPDTLRPLSAAEEQVMLAVWACPGAAARRDISQKLKATGWAAATVLNFLYRLEEKGWVRSAKQGNCNVYVPLVTRRAYGVYCMRQRLDTLFDGDLAAAVHALVSESGCSQSALEQAIRVLEEKHQETEEYDLYDPYGMDHLQNVLSYFDQQQPLCAEHDRIPKDLYREFGVKAGLRDETGKGVLAGLTNISDIRAFQYVDGVKHPADGQLLYRGYDVKDLINGSRGSRFAFEEAGYLLLFGQLPTPEQLEQFCAVLGECRTMPTNFTRDVIMKAPSHDIMNSMARSVLTLASYDPKAADLDTANVLRQSIQLAGIFPMLAVYSYHAYNHYEKDASMYIHRPDPSLSTAENFLRMLRPDMQYTPLEARVLDVALLLHAEHGGGNNSTFTTRVVTSSGTDTYSAMAAALCSLKGPRHGGANLMVMHMMQNIRDNLHDLEDDEELEAYLKKLLHGEAFDRKGLIYGMGHAVYSLSDPREVVFKGYVEQLAHEKGRDKDLSLYTRIERMAPQLIAQERKIFKGVSPNVDFYSGFVYEMLGIPMELYTPLFAVARVMGWSAHRIEELLSANKIIRPAYKSLGGTHDYIPRSQRAMEELQQHQGEWFFLHELNVDKVFSTIQRADYLILYYIKVEQEAHPGEKLYLADLAAAMGLRVTELSKGIEKLQDSGFVTWKTDREAGRTYVELSSKAVELMAEEQALLQRCYRRMRTELGDEELRRAAATMQRATAILKEEREKEFPAAQMENWKEEKITLLPRRLFLRLAALALAAVLALGLTACDSLPGSGGHIVKPSTGTSQPFEMHFIDVGQALSVLVECDGQFMLYDGGNVDDGSLVVSYLQKQGVEQLQYVFCSHAHEDHVGGLAAVMAKFPAGHAYSPVTEGSTKCFNDFVKYTQQQGLQLEVPSVGTVWPLGSATVTLLGPVTQYSETNNTSLVLRIDYGSTSFLLTGDMEKTAETDLVNSGANLKADVLQVGHHGSSTSTGYLFLNAVLPEMGVISCGTGNKYGHPHEETLSILRDAKVDVYRTDLQGTITIGSDGQNFTVGTERFVPDSQLNPTDPSSSSTAQQAYIGNVNSKKFHLPTCANLPAEKNQVLFSSYDEAIAAGYTPCASCIKMEHSTPQIYTEFLPISRADMEARGWEQLDFVVVGGDAYVDHPSFGTAIISRLLEAEGYKVGVLAQPRYTDCEDFKRFGKPKYGFFIGGGNVDSMVSHYSVAKIPRAEDEYSPGGKAGARPDRSATVYTKLAKQAYPDLPVILGGLEASLRRFAHYDYWLDTVLPSIAEDSGADLISFGMGEHQTVEIARRLAAGEPVETITDVNGTCYLTDFDHLPQRYVECAGFKKVASDKTAYAKACRIQMDNQDVVSGQIIVQKQSEKYLVQNIPAKPLVRGELDKVYALPYTRRYHPIYESMGGVPAIREVQFSIIQNRGCFGGCNFCAIQLHQGRRVTSRSADSIVEEAERMTHEPDFKGYIHDVGGPTANFRFPSCREQMLRGMCTGGKHCLAPTTCSHMIVDHSDYLKILRRVRELPGVKKVFIRSGIRFDYLMADPDDTFFKELVEYHVSGQLKVAPEHCAPNTLAYMGKPPIETFNKFKDKFYELSKKAGKKQYLVPYLMSSHPGSTLKDAVYLAEYLYKNHMRPEQVQDFYPTPGTVSTCMFYTGLDPYTLKPVFVEKTPEGKALQRALLQYYEPRNAEKVVKALQLTHREDLIPLLVPAVGRRAVQRTARRAESAEVTIHNDGTYTVHSNQKGRSTGKNARAAAPAGRQPSPGARFAPNSAPGHKPKNNQQKENATWKTGKKKKMATKKRKSTKRRTAARRKKAEQRLPAGLGTLFGGLLLMVLAFVRGDSVWRVLHDVLFGLFGCGSFVLGAAVCCLAVLYTRGEELLSRILKLVLGLIFVCGTVIVFSDIQPQGLSALQMLSACYANGVNAWLSGGAMGFVLGGVLLLLCGRPAANLIMVVLLLCGSLYIFDITPAEVWVWLCAVTGGIHARGAAFAEQRSARRAERAAIRQAEREIDEEYDETEDEPLDEEDEPAGLHLGVPDWMSGVLRWGHKVTQEMEADAAETEAAPAAPAQPEPAAPPITPVRVSVAHPRAAFDVDLGPDHTALSEGGSEPIEPLIVGPGGTFGQDPLRPASKPTQPPIVADPVVAAAADFFAKEAPQPEEPSPAPAFDTPIVQPAAPVVQPQMPTQPEAAPIQPAVPRVSAENAVAFRSAPDEDGWISITAEPVEEKDINSLVAAAMEKPAVSEQAAATAPAEETEPVDRYEYQYPPIELFEKTQEESDPGAQEELKANAQKLVDTLESFGVRTRVLDISRGPSVTRYELQPMAGVKISRITSLADDIALNLAVADVRMEAPIPGKPAVGIEVPNHKKTAVSIRSIFESQSFLRMTSPLGIALGKDIAGVAQVTDLCKMPHLLIAGSTGSGKSVCVNSIIMSLLFRSSPEDVKLLLIDPKVVELAEYNGIPHLLMPVVTEPRKAAGALGSAVQEMERRYRLFAENNVRDIKSFNKLAAEQPELEKMPYIAIIIDELADLMMVVGKDVEDSICRIAQKARAAGMHLIVATQRPSVDVITGLIKANIPSRIAFAVSSQVDSRTILDGAGAEKLLGQGDMLFMPVGAPKPTRIQGTFVRDEEISRVLDFIKSSATVQYDEAMIEAMEKHAIQDGKKGGGGADAEEDAGSDPMFKQAVDVVIDAGQASTSLLQRRCKLGYARAARIMDEMEQKSIIGPYEGAKPRAVLISRQQWLEMQMNQPEEMDTAKDTPAEQHRMEKEDIEDLGTVTLSRGGHVIHCLTVIGQIEGHTEAPQGQKTTKYEHVIPQLVAVQEDPRIEGLLVLLNTVGGDVEAGLALAELIASISKPSATLVLGGGHSIGIPLAVSARHSFIVPTATMTVHPVRHSGLILGVPQTMHCFEQMQQRITGFVAAHSGMPEKRYTQLMLHTGELVMDMGTVLDGRRAVKEKLIDELGGLSDALAWLYGEIERGMNTPQKASIPVIKRLPKYYRYLRSLQADGITSISSRELASQMGTTASQVRQDFNCIGDVNGRQGIGYSVENLLSILESLLFGNGDRLPTILIGCGRLGKAVSRFITTDTNGYKLIAAFDVAENEVGKEISGIRIRHIDELEAFCEENKPKVAVLCVPRDGAQQVSGRLVDLGIEGFWNFSHYDLSVSYPNVVVENVHLGDSLMSLGYRLRNQEMAKLYFRYGAMNSGKSTALMQVAHNYEEQGMKVLILKPQVDTKGGGELVSRLGVRRKADLLIPPELDVFEAVQAANAASGPLACVLCDESQFFTPEQAEQLFMITVDLNIPVICYGLRADFSLKGFPGSTRLLELAHTIEEMKTICTCGRKAICNCRKVNGRFVFEGEQVAIDLENDVQYVSMCPQCYFKARRAFYAARKNMSKAISRRNFLMATGAVGAAGLLAACGSKPAASSTASSAASQAPAASADESLALSDGPVSLSISWWGGDSRHAAYQSALEAFQAEHSNITVEPTFAAWSGWEEKMAAAFIAGNAQDVCQVNWNWLYNYSADGSKFVDLNTTSKFIDLTQWDAAAMDACYVANSQQCVPVSMTGRIFYWNMTTFNKAGITEVPKSLDDLMAAGKAFQEKLGDDYYPMHLGAYDRMILMVFYLESKYGKDWADPVTSTLNYTEDEIAEGLAFIKSLVDNHVMMNLKTYYSANSDTATHQSNEWITGKIAGIFEWDSAASKYSSALDDSNKDGFTVGEEIKFGDNNGGFSKVSMGLAITKTCKNVAEAATLINFLLNEEKGASIMGSECGIPASKAGLKFAQDAGAVKDLVAEANAKVMAFTTNKLDPLFENNDLKASGTGIYQEVFDNIDYGDQTPEEAVETLLDGMESVGYTIGMNEIGASAARTTDALVFSENGYQTLNELLPVCDLLHCLLQILMKKSNAPAGARTPFQKWVDKYQGLFYLIPWIIGFLVFKAFPFGQSLYYSFTDMNFFKDGTSFVGLANYITAFHTRKITKALIITFKYAFITVPLKLIFALFIAYILNFKIACVNLFRTVYYIPSILGGSVAIAVLWKAVFSVDGLLNTVVRAVTFGAVQGPEWLSDPNYALWIICFLRIWQFGSAMVLFLAALKGVPADLYEAATIDGAGKWRQFFSITVPMITPIIFYNLVTQICQAFQEFNGPYIITNGGPRGSTTLISLLVYNYAFKSYDMGMASALAWIMFIIVCILTIIAFTSQKKWVYYSDERMGMKASNKIATFFKYFVLILVGIIMIYPLLWMISATFKDNSEIFAGISLWIKKPTLDGYRNALNNFGGSINILQAMLNTYSYVIPKVICTVVSACIAAYGFGRFDFPGRKLLFNIMLATLFLPQVVLNVPQYLLYNKFGWVDSPFYLAIWVHCAFATETYFVYQLVQFMRNVPRDLDEAAAIDGCSSFQTLYKVIVPMLGPALVSCALFQFMWSCNDFMGPLLYVSTPGKYPMSLFVKLSMDGDTGFAWNKILALSLISILPQLIVFFCAQDQFVEGISAGAVKGMKAEREKIHAKVKADTVRLNGSKLELTADEETCTFLLVSEGSCTLQMGENSLLVNPGSALLLGAGDAVLTAAGATVPELVGCRFPLSALHELRSATQRDFARLFLPGEATVLYGPVPWVRRLRTLLEMMRSAMPEQDYPGGLYLLLILHYVEQECLAESSAAARPRNETIEQVCAYLAANYRQKFSLTEVAARFYLSPYYLSRLFRRVTGQSIVDYLNNRRIEAAQKLLETTELSISAIAEQTGFASAAHFRRVFREVMDISPLQYRKKQTKMNLTLIRSMTRSAVFELENELCYRPAHPFTVALNGKTVYEACNTNVFSLFSLLPGTAYTVEVQAEDETLKLDFTTEAETFFVDAARYGLVADGETDNTVRLQAALSTCPKGGTVYVPAGRYRTASLFMKSNTTLYLEKGAVLLGDNDRTHYPILPGVLPSENEVDEYYLTGWEGNPLDSFAGLLNITQVHDVVVTGEGTLDCDAENGDWWVNPKVKRIAWRPRAVAAVDSENVCLHGITVQNSYSWTIHPIFVKHLDLLNFNINNPYNAPNTDGIDPESCEYIRIIGMNIHVGDDCIAMKASKVFLGMKLKRSCEHTVIRNCLLDKGHGGIVIGSEMSGGVKDMVVTQCLMDHTDRGLRVKTRRGRGNTAVIDGLVFRNVEMRGVKAPFVINMFYFCDPDGHGPYVQCREPMPVDEYTPKLGSLTMENIVATDAQFAGCYFDGLPEQPIERVTMRDVSITFDPNAKEGQAAMADNRPLVKKLAIYAENVKEIDLHNVKIEGYEGERLHFANVGHFEEDMTHEEILSMLGDYVDYLIANSSAEAPMWNIEKVRSGKPNKWNYIDGCMITACLSLYKTTGDEKYLEFSKEFIDYFVQPDGSIKTYDPKEYNLDNVNQGKNLFILYDIYGDEKYRKAIDTIRSQLLTQPRTKEGNFWHKDIYPWQVWLDGTYMAQPFYMEYETRFNKMQGCIDSYKQFMNIKKHMRDEKTGLYYHGYDESRQMYWADPETGCSPNFWLRAMGWFLVAMVDVLERMDEQLYNEYRGIMAMLKQAVEDMHKFQDEQTGMFWQVIDHPEAEGNYLETSGTALFTYAVLKGVRLGYLPKRMAAWAEKAFYGTCDRYLSKNPDGSLQLDGICLVAGLGGKDHRDGSLAYYFSEPVVCNDAKGVGPLVLAYTEMIARKMEQIKKFLHGKGFALLLTASLLAAAAAGVWAVRALRAELQKSLDGLNAPGTTQQTTPETEPDWDAQEDTTWQQPVTDVANSKADVPQQTPSGASSGAQSGSGSLREPSALQGASSPASSSAQPAAAPSMPGRVLNAFSGDELVYNKTLGDWRTHNGVDYACTQGAAVAAPVAGKVVSAGAEGNWGTVVVLEDAAGRSWRLCGVADPAVKAGDTVAAGQKLGTVGTVGCECAEESHIHVEVKQGESYLDPAKLPEMNTFVLIVLGQIVSLFGNAALRFALPLYLLRQTGSAALYGGITALAMLPALAGMLTGGALADRCRKARLMALLDLVTAGISAAAAAGLPHLPLLPLVLTVLGSLYAIQGLYQPVVRACLPLLLNGTQLLRGNAVIQLVDTVDELLGPLLGAVLLEHLGIRGLLVLCGCCFALSAGMELCLRIPQDVPYDTKLSVRSLWADLRESAQFLTGQAAVLRLAAAMAAVNLLEVPALTVGVPVLVVQTLQKSDASLGLVQAVLSAGGILGGVLAGTVFVRHPIRSGTPLLLALSGVCAALGLALRVSVLQFGSILVLGAVFMAVAALFNVWFFAQLQVLVPQAQLGKTTACCTVLACLTQPIGQAAYGIAFQHWAAHPADVLLAAGVLSALVLWLLQTRRTVMPRNKYPEQTVEKILDAAALLFLQKGYQNTTLQDIIDATKLSKGAVYHHFRSKEEIAQRVGDRLGDQMWEPLRHIRDDPALTGLQKLQAVFAVSFAGQRQQQIAQTLPHLCSNPQFLAMELTNIEAHLAPECIAPMIRQGMADGSIHTANANALAEALFVLADIWLSPQTRPTTPAQQRARNVVFQQMTHALGLDLLTDAQAEQLVQLCTPVKDMARVLIVGAGAAGLMAAGAAVRQGHQVTVLEHTEKPGQKILVTGKGRCNVTNDCPAEEFLRHVRTNPRFLYSSLGAFPPAKTMELFEALGVELKVERGRRVFPVSDKAEEIRQALLRYAQDADIVYDGAKKLLLEDIVPEAEPAPMAAENPRHPKKKKAGPALRCVGVRGTSGREYRADAVLVATGGVSYPTTGSTGDGYKLAQQAGHTLVEPVPSLVSLVSRDPDCKKMMGLALKNVTLTLLEDGKAIFDEQGEMLFTHFGISGPLTLSASSHLGDMKKHRYIAEIDLKPALSEEQLYDRITRDFALLANHAAQGALVKLLPSSMQPVMVARWGIDPATKANQITREQKRELVRLVKHWQVSIDARGDLAHAVITSGGVSVREVDPKTMQSKKALGLYFAGEVLDVDAYTGGYNLQIAFCTAQSFANNLMVSVAIDGPAGAGKSTLARRLAAELGYIYVDTGAMYRAIGLYALRAGKDPKDNAAVDALLPEIELRLASIAGEQHIYLKDEDVSAAIRTEAAGMAASAVGANPAVRAFLLELQRSMAKKQDVLMDGRDIGTVVLPDATVKIFLTASPEARATRRWKEYQAKGIDTPYEEVLADVKQRDYQDTHRAAAPLKQAEDAVLLDTSALDFEQSLDAMKQIIAKKIGGMVLYYILVPLAWLVWHIGFRIRVEGRENLKKVQTKGYILAPTHVSAIDPVFIVVTRWGRRMVVFAKKELFEINALLTWFFRCCGGVCVRGTKDEMAVISQTVEACKQGKTLLIFPEGTREKEGKLLPPKSGLFVIAAEAGVDVVPCRIFYDTPDGRMHLFCKVRVIYGEPMPAAQFAMEGRRDTKKLRANKQALLEAWEKMGAMEIRLAKTAGFCFGVNRAVELTYGLLAEGHKVATLGPLIHNPQAVEDMRRKGAQVVDTVQDVPAGCEVVIRSHGVPRSVYDELEARGIPYYDATCPFVQKIQRIAAEAEKEGAVLLVAGDKTHPEVQGIVGHTRGEVFVFADLAELEAWNGPSDPQKPLFAVAQTTFQVTKWKESSEFLKKAYTNARIFDTICNATWARQQEAEDLSQKCDIVVVIGGHHSSNTQKLVQVAAKHTRAVTVETASELRPEWFADVKVAGVTAGASTPSSIIEEVLNSMSAEINDNMSFEEMLNASEEKRVHAGSIVKGIVTSISANEIQVDIGAKQTGFVKLSELTDDSSAKVEDLVKVGDELDLIVEKVMDQDGVIQLSRKKLASRKGMEEIAKAAESGEVVEGDVTEFNKGGVVVNVKGVKVFVPRSQATMRRDEDYTALVGQHVQLVVTECSGRKIVGSINKVTAEQNKAKREEFWANVEVGKTYTGVVKSLTSYGAFVDIGGVDGLCHISELSWNRIKHPSEVVSVGDTIEVYVKDIDTENHKVSLGYKKSEDNPWEQLKNNYPIGSTFHAPVVSLTKFGAFVRILPGVDGLVHISEISNDRVEKVSDALKVGDMVDVKLLDVDFDKKRISLSMKALLNNDAEMIKFFKKHWEVLSYLIFGVLTTLLNIVLYALFSRLFGYTAANSWGNVLDNALCILFAYCTNRAFVFRSKTTGKAMAKEFGTFVTCRLGTMVLDAAIMIVGGNLLAAQGAALMDGLIGHFIPSGVSYTGAAASAAASAAGVVIIGGADGPTAIFVSYNAQELWGLCVKVFSNVVVVVLNYVFSKLIIFKNRKMKRGLKGFAFLVSGLVLGIIGATASVTAIALSAVGMAKVRRASKMNREEILSHVDHTLLKPEATWPQIQQLCDEAIANHTASVCINTCYVKQAVEYMAGRIPVCCVVGFPLGAMDTASKAFEAKTAIENGAAEVDMVINIGRLKNKEYDAVREDIRAVKQAVGDKILKVIIETCLLTEEEKEKMCDIVCEAGADYIKTSTGFSTAGANFHDVELMVKGVRGRCKVKAAGGISTVEDMETFLALGADRLGTSRAVKILNGEQAKGYMNIPEILVANGTGAVLVSFLLLLRVRGESKNSVGTELFCRILVVTLLAQATETISFLLDGVPGAASRFWLYLTNTVCTGATVCVGYAWCLYVDFRVYRSIGRLRRRHLLLGAPLLALLVLLVANLFGTGWIFSISADNAYHRGPLNILLYLLLFSYYAESVWQVHKAKRDGITVEFFPVYYFVVTCAVGTLLQGAFYGMAFGWLSVSIAFVLVDSQTRSLRGYTDELSGLFGRKYMNYCLDRIHATQEKDVYGIMMDVNCFKEINDTYGHAEGDRAIQEIGHILSGALVANSVAIRMSGDEFMVLIRHGSEELLDEICTAIEQRVQHYNATAPAGSFQLSFSTGVAKYEGGSVEKFLVELDQRMYAEKRAFHAARDGHAAPEQGNAPSIMARHLFTSESVTEGHPDKICDQISDAILDEILTHDPNARVACETCASTGLVHIMGEITTNCYVDFQKVVREVVADIGYTRAKFGFDADTCAVISNIDGQSPDIALGTNDQVGGAGDQGMMFGYACDETPELMPMPISLAHKLAKRLTEVRKSGEMDYLRPDGKSQVTVEYDENNKPVRVDAVVISSQHSESVSMEQLRADVMEKVIKATIPAELLDENTKYYINPTGRFVVGGPQGDTGLTGRKIIVDTYGGYARHGGGAFSGKDPSKVDRSAAYATRWVAKNIVAAGLAKQCEVQVAYAIGVAKPVSIMVDTFGTGTVADEKIEQAVEKVFDLTPAAIIRDLDLRKPIYRQLAAYGHMGREDLGVKWENTDRVDALKAAVAALMSIVPYQFVSCVDFLRLAQLFFLFLQENVSFLQKRDQIFTVSQSLSDFMSIEISPKSFFEQPSVADMRLIACPGAEELTGLIDKHLVRWAKAAGIEKDTFIISCDCPRFQSGDAKGLVKESVRGDDIFIVVDPGNYSVTYKLFNYENHMSPDDHFANLKRLIQPVAGKAHRVSVIMPSLYGGRQHRRVVRESLDCAVALQELQTMGVRNIITFDAHDPRVQNAVPLMSFDNAMPTYQVLKSLLKKDPTLSFDKEKFTVVSPDEGAMNRNMYFSSVLGCNLGMFYKRRDYTRVVNGRNPIVAHEYLGESVEGKTVFIADDIIASGESMLEVASNLKERGAANIIANATFPLFTSGLEKFDKAVANGTLTYVVGTNLTYRMPELLTRDWYVDVDVSKYAAYFVVALNHDMSVSSIIDPLKKIENLLANRKMEHFVEFEDVCKYYQTGSVKIAAADHLNFYVDKGEFCIIVGPSGAGKTTLLNILGGMDNCDEGNVWLDGRNVSRFSARELTTYRRYDVGFVFQFYNLVQNLTALENVELASEICRDPLDPAETLRSVGLGERLNNFPAQLSGGEQQRVSIARALAKNPKLLLCDEPTGALDYRTGKQVLGLLQDTCRKTGRTVIVITHNTALTGMADRIIQVRSGRIVSNQVNEHPVPVEQIEWMSTVQKSYRKNILREMKSSISRVVSLFGIVALGVMMLTGLMCIAPDMRTAAQKYYVQQNVFDLRVLSTLGLSQGDISAIAAVDGVDAVQAVKYQDVEGHWTGDEQTTVARLYQLPADPQADTPENMNRPVLLSGRMPEAAGECVVHVMGHGSPVELGTQLTLPEETEGVSGQVFTVVGTVQDPLHFSSDSESSTVGDGQLDCILFVPEGTLTADYYTVCYIKAENAGLYDNYSDEYQAAVDAVAEKLKAIQSVQCTARREELMDTANDKLTEARAEYDSQKAEAERQFAEAEAKLADAQAQLDAAKAQLEAGEKELAAQKAALPDTMQSGADKLVSSEEQVLEFEEQLQQIEMLVNLKKVADPLLTYAETALRNAEKALDEAEPEDEDYIELRDALAKAQAAYDNIYNQLQGYQQQLDAGKRQMYKQGLISSPNLSNDQLVTEAKAALRKMKLQLLQGQLQLTTGTASAYTQFDAAQKQLEEGWAEYNAGQTQLEESRTEYESRKAEAEQKLADGLAQLNDAEEQVSQIKKGEWYVLDRTSTMSCVTFAQYADRMDAIARVFPVFFFLVAALVATTTMTRMVDENRLQMGTLKALGYSNFSIAGKYLFYAMLATILGSIVGMVVGFVVFPIIIWNAYQLVFSLPTFTLYFYPGMAAASVGISAAVIGFATWYACRSSLAEKTAALLLPRAPVAGKRILMERITPLWSRMSFSQKTTARNLFRYKKRFFMTVLGVAGCTALLLIGFGIQDSLLPIVTKQSTELTHNDMSITLSDPKTLTMEQGLAQELDSNSAVQNWGAVYTKSTTIYNAAGESASVSIVAAAKDSDLTRYVTFRTRKGHKAISFDSGSAILTEKTAENLGLHTGDTFWVENAEGTRVELTLTGITENYMFTRLYLPRVQLESLLGTEEIPWNTVYGQTTCTDAAGYNALRTDLLDCNYVSGISFTEDTTELFDNLIVSLGYVVVLIIICAAALAAVVLYNLISVNLGERKKELATIKVLGFYDQEVYRYIFREIELLALIGSGVGLALGVPLHKFIVLTVEMDQLMFIRTIAPRSYLLAVALTMVFTVVVCFVMRRHVRRISMVESMKAPEMLEKFFHLKENHTDVKTEIMAGITTFMTMAYILAVNPNILSAAGMDSKAVLIATALASFIATALMAVLANYPFALAPGMGLNAYFAYTVVLTMGYSWQLALMAVFVEGVIFIALSLTNVREGIFNAIPMTLKSAVSVGIGLFVAFVGLQNAKLIVNSDSTLVTYQHFKGATFHSVGVGAILALLGVVITAILLVKKVKGGILYGILITWLLGIVCELTGIYVPDVDAGMYSVIPTAFVSFDFSALGETFGQVFKTDFSGVGLLNFFAVMFSFLFVDLFDTLGTLIGVASKADMLDEDGRLPNIKGALMADSIGTCVGAVLGTSTTTTFVESASGVTEGGRTGLTAMTTGVLFLLATIFSPLFLTIPSFATAPALIIVGFYMMGSAIKIDFNDPSEGIPAFLTILAMPTAYSISEGIAIGIISWTIINVVTGKAKEKKISPLMYVLTVLFILKYVFLMAHYPGYTVLRTEDCPEQHGTLTLLTHDVSGAAVLLVENEDVNKAFGIGFGTFPSDDTGVFHILEHSVLAGSEKYPVSSPFVQLLKSSMASFLNAMTFPDKTVYPFATPNETDFCNLMDVYLNAVFCPLAMVDSAVFEQEGWHRDADGTVSGVVYNEMQGALASPDAQLQNALQRAMFPDTAYGFVSGGDPASIPALTYEKYQRVYRRHYSADNCCITLYGKMDMADKLARLDKDYLSKMPKAAARPRLTMQDEQPGAFVELPYYTDQPKPDEVQCALAWYTGAFADRERQLGVEILLGALLSTNSSPLKAALLAEQLGADIDIGFDDSTLQPTLELLLRGATVDSARKFAPAVRKAVDELLKTGIPHDLLLAALNEAEFASLERPGSLPDGVLDAINAATGWLHTGDTALLLHTDKLFAALRSKLEEGWFDTLLRELFAPAPVQVLQIPTAPKAEDTAAPVRTDGKLVLEHPLTAADLGAGDATPQGSAEQLAGATLLRHPSAGSLYLNFYYDLGTVTPEELQYLNLLTDVLDELDTPAHTAQQLNTLRSTWLGDSRAQLDLWTGRQEGAPCHAKLTLCLSLLERSLEKAVEIGGEWLYDTVLTGAAAEAAYARVVSQLKLRMEQLFIQQGNEFASTRARAHYYVEGAADEACTGVSYYHFLCSLLEKADWAALGAKLDAVRSRVLQTAALTVSLHGTEDALEKLRTLLPESRFAAARRTPAQPYTQPLTPPVNEAFIIDGGVNYDVLAWPMPRDSRRRVLARVMSYEYLWHAIREVGGAYGTGMLCADGIEFLYTYRDPHLRESYDTFADAPAVLAARDYTARDLDEFIVGTAAKLDTPRKARAAARELDHRYFCGITDEMRAADRKALCSVDTALLKAQAAALSDVLSGGVRVAFGSKDAVEAAKDLFDRVETLMAQPTPDTQTELERREAALAAREAELARQQAELQAQKADFEQGKKRLLDNGRKDFVNPKEKLYDKFPLTVHQMDIIIGVLFALIALFLVLGVTHTSFFGLFGGMEATKKLNGKAVGKWLSNNAIIMMMLAVTLIVGIIHPNFFSGTNMINLFKNVSIRYIIALGISGCLITTGNDLSAGRLAGFAACLACIFAQTEGASGKFYPNMPTLSTPVVFILVIAICAIVGLCNGLVVSYLKVQPFIATLGMQQVVYGICLVYTGGTPIGSLNSNFTALAKDTFLAIPVLIWFALIVAVCFWFLYNKTRHGKYMYAIGGNEAAAEVAGVNVNATKIRIYILASCMFGLAGCLLAAKSGGASVNTAQGYELDAIAACTIGGVSTTGGVGTVPGVLVGVLVFELMKVALQFMNVNSSYTYIVQGLVIIVAVAIDIRKYLAKKMSEYRLVMKGVVKTFPGVKALDHAQLELRPGKVMALMGENGAGKSTLMKCMFGIYKMDEGEIEYEGQKVTIPTPLDALDRGIAMVHQELQPIPARTVAENIWLGRYPTKKYGIVTVVDHAKMYKDTDELLKKLKLDIDPHAKLGSLSIAQMQMVEIAKAVSANCKVLILDEPTSSLTANEVESLFRIMRELKEQGVALVYISHKMDEIKVIADEVTIMRDGQYIGKWDVANMTKEEIIAKMVGRELSNLFPPLENVPSDEVMMKVEDFTSIHPRSFRHCSFELKKGEILGVAGLVGAQRTELMEGIFGLRAHTSGKVWIKGEEVNIKQPRDAIRKSVALLTEDRRATGILGVLSVADNISIASLDALRKGPIMLDNKKILDLVATNKEKMAIKVPSPKTQIKSLSGGNQQKVLIARWLANNPDVLILDEPTRGIDVGAKYEIYCIIADLAKQGKSIIMISSEMSEIIGMSNRVMVMCDGRITGFINGKDATQENIMALATQFETAPDAAAANQMKMISRRDFLKASAVVGATAAMTACGGSSSTSTAASSVASSTAASAAATNGSANIGVCIYQFADNFMTLYRADLEGYLKDMGYSVTIMDGKNDQNTQTEQINTFLQQGVDVLVINPVQTTSAQTIVDTVSPSGTPIVFINREPEESVLDSYKGKCCYVGADARQSGTYQGELILETETQGDINGDGKITYIMCKGDPENIDAQYRTEYSIKALTDANKEVECLYEYLDNWDQTTAQQDVANALSQYGDKIEVVFCNNDAMALGALQSIQQAGRTVGKDVYLVGVDALVEAVQNVVDGNMTGTVLNDDVGQATKAAEATKLFVEGKDVEKYYWVDYVKVTKDNASQYLKEDMCVTAYSQTHLSHASVIPDSIIPLYGGVPQENKFTRLVQMFCYVSTKADQRLQNLFANYHNFSCRCNQHTNMMKVCKKTCLNMTECCMTAKKPRKGAIHFLKDIFRDTTQRKENAFYTLLPEGKNNTGREKCLLPGWGGTVPLMRGERFWWQCPKYERPFFACRASRDNKTDETALCLESVKYTTRKTTAQKYPMALQKCTLSGAAGGMGQTKPAAGLKSLNRAADTLSTLLAQEVKELNERQKAARRENTPDPGMMKGLKEATAVLKDLAGVVKTLNDQGTELEGTECGVVLLPPVEQEEKEMNRTERAVIVWKPQPRQLEFMRRPEPEALYGGAAGGGKSDALLIEALRQVHIPHYRALILRKTYPQLSDLVDKSQMYYRRAFPEAQYNATSHVWVFPSGAKIWFGSMQYTKDRTNYQGKAYDFIGFDELTHFEWDEYSYMMSRNRPTGPGTRVYMRATTNPGGIGHGWVKARFITPAPPGTPIVETVTVRLPDGTDQQMERARVFIPSSVFDNPALLANDPGYLASLASLPEAEKQALLYGSWDSFSGQVFTEWRNDPAHYQDQRWTHVIAPFAIPKHWPIWRGYDFGFSKPFSVGWYAVDEEGRLYRIKELYGCTGRPNEGLRIDPVEQAKRIREAEQNDPLLRGRVIHGVADPAIFDESRGESIAAMMERSPHFLHWQPGDHTRLAGKMQFHYRLRFAPDGRPMLQVFSSCKHFIRTLPNLVYDESNVEDIDTRQEDHIYDECRYVLMEHPISPPEASAAPPRPDDPLELHRQARFYRIMEDTRAESLPIGAAEAAAALQTLQRYKAGKAALDKRLIDNELWFRMGHWKNYRDPLMPGKAQPSSGWLFNSIANKHADAMDNYPEPMVLPRAADDQATAQALSSVLPVVLEQADYEQVYSDVWWRKLKQGTGVTGIFWDPAARGGLGDIAVRSVNLLMLYWEPGVQDIQDSPDLFHLSLEDTARLTAQYPQLAGHAAGVVDVPRYIHEDGQTTANKSVVVDWYYKRPDENGKLRLHYCKLCNGVVLYASQNDPALAARGLYDHGKYPFVFDPLFVEEDSPAGFGYIDVMKDCQNAIDKMNHAMDENVLLASRQRYVLSDTAGVNEEELADLSRDIVHVVGRLNEDSFRPLQTAGLQGNSLSYRNSRIEELKEISGNRDLTQGGTTGGVTAASAIAALQEAGSKLSRDMLKSAYRAFARQCYLIIELMRQFYDEQRVFRITGQRGESEFVPFSAQGLRAKPVPAVGGVELGSREPVFDIVVSAAKKSTFSRLSQNETAKECYKLGFFDPANADAALAALEMMDFEGVEKVRARVRQNGTLAQQLLQLQGQMARLSAALAQQPGGTQTAQDTAGLTAQLPVAAAARAMNWNGKEAKMIKVCYSELDGPKGLSLRLEAAGHAGYAPAGQDIVCAGASTLMQALVYLLAGEESARSDAWDEPEGPRLAVAVQAPVAPWVQGAFELAKAGFTLLAERYPDNLRFADVSRSGQQSMMDLQLFAEGEAAPALSPAQSRQAVAAGTLKPEAPAAQPEAPQQTPAEPEPQPETPAQPERPVLPPLPLPVENTVHSLHARWAAEEAAMRRSQPGFDLKAELKNPEMRRLMQLPGMRVQDAYRLAHYEDALRTTAQIVEQGVVERVQQRAARPLENGLRPGAAASVRPDVAAMTRAQREALERRVLHGAQIELMNFNIQLFADAQTNTTGTMSVEMKTFYEKRLIDQAEPRLVHDQFADYYPVPQNGGKTIEFRKYDSLPKASTPLTEGVTPNGQALNVTSITSDLHQYGGWTPLTDVLQMTAIDNNVVQATRVLASQAGRTMDSITRDVLAGGTNVIYAPKLGADGAETAVTSRKALDKSCTLTPKLFFQAAAQLGAMNADPIGDSYVAIIHPYAAYDLKTCKEFMEVHKYADPDTMFRGEIGKLGNIRFIETSEAKIWKDDTCPAGLAVFGTLVLGAHAYGVTELEGGGLEHIVKQLGYGDDPLNQRASVGWKGMRAAERLVEQYMVRIESVSSYSATAAANMAEKNVRIRLFKDNSRYKGDLFVSVNGVNYKIRRGVEVEVPPAVAEVLEHSQRQDELTAARIAAAENAAQMTIGEALERAEQLRPNCRIETETRLQWLREADALLRTKLFDRAAAGAFDAVGADRPWEQPVQDDQTLLAPPPFDALYPHLLCAQMDAALGETDRYAGEQAQYNALYAELAVWLRQNYPPRSRAQWRWMVLADRIRLANTRQLLRAFGGLNETYGCSEAEYSAGVNFSTRDFPALSTRTPRRRLRALTGLNGMYHLNGLLTVCGRDVVYTPDDAAAPAVTKPDAVTDGRKALVGIGTKILIFPDKLAFDTADSSVTALGALWTAAGQSVTFAPCDAAGKTYQVEAFGREEPAEPADGQLFLKVEDADHPWRYDSTLEMYSKNSGSWAAIPLEYCRITAAGLGKLFRQWDTVTVQGAAAEAAGQSPELNGDQIVYDVGEDWLRVRCTPQGAYFYGTLVQNAAAAQWQSMDGKQHRSVEAAQTVSMERRVPELDFVTECDNRVWGCNSRENVIYGCKLGDPTNWFSYRGIAADSYAVTVGSDGAFTGAASCMGYALFFKENTLHKLYGSKPSDFQLSSLRCRGVAKNAARSLCVLNETLYYLSPDGVMAWDGSLPTKVSGALDAAKLSNVQSAVGGALDGRYYLHISRESARLLVYDTEKGLWSEEDVCSCDMTSTGGQLYLWDGQALWAADPTREPDWQTTDGVETDIPFELVTGDVGLDGTEQRYLSRLTLRLDAECTSTVEVAVSYDGGAWETVASLAAQGSRRSYDLPFVPRRCGSLRLRLRGKGQITLRGLVRTIAPAKGKLWEEDASWQAMASMNGLSKLGVPKFSDHMDPEDARALRSYLYQMQEQLQYVLTNLDTENMSDTLRSKLQGLMASKKKEELLQPEVQTQAQPAAQSTYSAEGLNSRADVEKAMANVSYRPGQQVTDAADALKQWQQNRPADYQSSYQDKINSLLGQLLERENFQYSYTRDPLYRQYEQLYTQNAHNASADAAAQAAALTGGYGSSYATSAAQQAYQQQIGGLASAIPTLYNLALDTYQSGGEELVNRLDQLNGQEQNAQTLYDRQLQDYYTQLQQKGEAYNDAYAKDYGQYQEHLNRLDTLHGYYTAQEQAEISQRQQAFNNIMTVLGVIGDVVQLAITGTTGLGTLAGSLLNTGYNIYSGNRAYEAERADTQWSQQMQEKQRQDALTQQQYDNTASERAYQDALKQQAFNNNVTTQKLNIAKGEWALKQANARQKAAQAASKAAAARTKSGSSSSGKATGSSGSASGGSRSAVSAGVPYTAALLRSQGKNDVAITSALRQEGYTPAQIAKIIQEMNKMTAEQYKPIYHWFSAHPAVKRLVVFLDRWLPLVPFVCYPVLLCLLNIRLSRLFLTQKQAALDFMVLIARSVFVPGLVFWGGTLLRSRLHFPRPYEQPGFTPLVAKESRGHSMPSRHALSAAVLAAVWLYFYPAAGCVMVGVALLICCLRVLTGVHHVRDVVCGFALGFALGCAGMWLLMQTISLPVLEAGEYAGGIWYYEPHTYQSYRYVLGRVGKHPLVCIGINPSTAQPGALDPTLKSVERLAAANGFDSWIMFNVYPQRATDPNDMDKTPDRALCDENLRWLQAVLAQTEPTMWAAWGTLIEKRDYLPGLMREMVALTREREIPWVTFGKRSKKGHPHHPLYLRKDSTPEPFDVENYLDTCFMLEDYKSALRAGQRAYRARIARGQSPYLAVLDDVLKGVDIVAQEPLGLVEIPSDSLVGTKTSGRHTAFSYDFMPLLEPDTEFAAKWSNLCDAHLEEGIHTPIIAFEYMNRFYVQEGNKRVSVLKYYGAVKIPGTVTRLIPARTEDLKNKIYYEFLDFYKLSKVNYVHFSKLGGYSKLQTLVCKASGEAWSEDDRLNFAAFYTMFHQQFEALGGRSLGLTTGDALLVYLSVYRYSDTYDATPAQVRQNLEKLWNEVKVLTEPHGVELSLEPPKSPAEPLLSKLNIFSPSKQPSELRVVFLHEYNAKISAWVRAHDEGRDALAKVFPDKVYISCYEDVNPEVDAEQILEEVAHNNADVVFATSVRMYNACLKVAAQHPKTRILNCSLNAPHPLVRTYYPRTYEVTYLLGMLAGIMTKTGHIGYVAANPVYGVPAAINAFAQGLKSVRPAGRIWLRWACQPDTAHPLDFADCPEIDMVYARDSREPADTNRDYGLCRKLPDGSLQPLGLPIWRWDTFYVQIVRSIFDGSWDNAATTRAVNYWWGLRSGAEDLEYQEALPSGTRQLLDLLETLQGSDNVHIFPEKLYDNEDNLHSPENRVYSPKELMEMDWLDACVHGKLPHYDELDVKTRTVLAINGLDNVKGLEKMEHTNVKILAISDVPSKALWDYDTRARLEGIDLILSCGDLPKKYLEYLTNFTAAPILYVHGNHDGSYQTQGEPGGCICVDDQVYTWKGLRIMGLGGCQRYNKEDTYQYTEKAMRRRVHKLKHQAHKRGGIDLLLTHAPAKGLNDGDDCAHRGFECFNEILDEYQPKWFIHGHVHLNYDAKLPRVCTRGNTTVINATERYVFEIPDPDPAEERKTLWRMLGFMPEKKVSTPAADAPAAEGKTRKSTKAPARRGRPPLAPELYVEMGGEQYNITDIIDRAKADYRTTHKVGVQSCKVYVKPEEGAAYYVINKFSGKLELMPKSRTLPGKKHRKAAPAIYSAVSYRFYNVFCKKGFTNEFQKRIIMATRTICFPISGYPYCKEQPVTFTWIKGSKRQNIRAVHDAVHTTDPDVSILEVSSASVQPEGEAVSSLRLLLRLDSVAQDVPISTVFEAAKVFEHGGPFADLLTCAPSKVHKDTRLRTNGKLLRYSLEGSEYPIEPHPDSFFEWLYCRALKQFPEKAAQLSRYNAFSDIAAAADSKKYYGDSPRAAAIYVGLAAAGKLPCIDSYESFIAEVYTEPKPLPKSGKSETASKKTPEVSAPAKEIPADESSQSDNANIPDAAQMEQILELPKATCLLLSLAKNAGLSANNSSELAYKGKEFFLDAYQKALKNKTLQINIHKNKFTFPMEEHDSGFHAVGVLTRSPAWEYGWKFNYLTENTSGAEKPEVKAKIQKPLTALEHLERCGYKIVQQVVPEKLPPIAVQRMAWKTGEALCDPVVVDFLQFIRTHMQSDGSFSFRIPKGASKKSFATLSEIAQTWDKMGLFAAIVIYPQNIVYELAQNETVRHFLSGKWLELFVEHQVQQILNRYREEQGAEVSVCSNVVLSETASVGSTHELDVVFSINGKFFWVEAKSSSRSIDYGKYASLCEKLNVTPESLLLVNSDLSVEECEGVSYFWNYRVANCATITQELESMIAKQIESTGNAVLCTDMLHSTIFCFRESICAKSADTTGIGTQIKKAFCKNAQPASTGCRTQGVWAQPNKHFEFGFMPRPKGSKNKTKTVKATVDFAAQIAEKQSAKEAAAAEIASITANIDALKADLKTKKAELKSIDKEIARIEAKKVKAETKAAESAKKAEAEDVLKKLLASGVSADDILAKLKMNFITTVNNAVAKRFEQFYDQREIHPNKLATHAGAYSKIDLLFHSMARRGENIHKRKDGRWEGRYIKARTPEGKIQWGYVYGTVYAEVKRVLIQKKAEAGFYNLKRTDLTFEVLAEVWLHSQRNAVKESTYAHYSYTLHKYLLPVLSKVPVASLEESFLEQAMQQIIAPIDAAHKPLGNSSARECLSMLRRICKYAAHLRLIRPMELEVALPKAIDQISAPLSPAEQQRLYQYVQENPTPRKIGLLLGVELGLRIGEICGLQWGDFDLKLGTLKINRTVCRISCENGHTKVVIQTPKTSTSRREIPIPKQLLIMLKKLRGSASNSTWFLSGNESKPTEPRCYRKSIKSYLKQATVRQVRPHALRHTFATTCLQAGCDVKTLSELLGHANANITLQRYVHSDLTRKRREMNRIFSHQVFMRGGNTLNVTMREGVNKVALRLFEHNEKAYHAAVRMMDQYGKAAIVHPTGTGKSYIAFKLIEDNPEKVVIWLSPSEYIFKTQLESLKRNDPDFPLANVHFYTYAKLMCCTQAQLDEIAAQKPAYIILDEFHRAGAECWGESTVALLKLCPDAKLLGLTATNIRYLDNNRDMAEELFDSRVASNMTLGEAVVRGILPTPKYVTTVYQYQKTLAKYQARVDNLRTPGIQDVNQKYLDALRRALEQADGLDRVFAHHITNKTGKYIVFCANKEHMDEMVSHVPEWFAGVNPDVVVYQAYSDDPNTDKAFADFKTDTSDRLKLLFCIDMLNEGVHVEGISGVILFRPTISPIVYKQQIGRALTAGDTAAPLILDVVNNFEGLTSISGLQSEMQEAVHRLYANGEGDKIVTERFEVVEQVHDCLQLFEQLQASLSSGWEHYFSEASIYYAEHGNLNVPKLYTTPGGLSLGVWLVTQRRVREGQIQGNLTEQQIARLDSIGMVWGNRKEIAWQHGFEVAKKYHDTYGNLMVPGKYTDPDGYPLGQWIIKTRQQKLNGRLKEERIAQLDEIGMVWNIFDAKWEKAYALAAAYYEENGNLNIPRSYVTAAGERLGQWVASQQWAYPKGKLTDEQVERLNRIGMYWGNRNDRQWNEGYQEAKRYFDAHSDLNVPADYVSPNGYNLGNWIKRQRYTRQNPEKSCAVLTEERIAKLDAIGMRWEKADSRPRRLELAQESKRKSENLNVSANHKTGEEIGLCSMSKFQHDVMLRIVKILNVLMIELPFAACWFLYYSHQTYANLAWEGHFAILGLFFILYIALGKIYDAFWMSMQRVSELVYGQILGAMATDGILYIVICLMSAKICNLLPGIAAIVGQLVMAAIWASCAHKWYYKTFPPQKTAVVYDVRHGMEKLINEYGLNQKYDVQVTLSVSECLEDLSILDGMETVFVSGVHSHERNIILKHCVGKGINMFVIPRVGDVIMSGAWPMHMFHLPMLRVGRYMASPEFLFVKRAMDIVISLVALIILSPLFLITAIAVKSDGGPAFYKQVRLTKDGKQFEILKFRSMRVDAEKDGVARLSTGDKDDRITKVGHIIRACRLDELPQLLNILKGDLSVVGPRPERPEIAAQYCEEMPEFALRLQAKAGLTGYAQVYGKYNTTPYDKLQMDLMYIAHPSLIEDLKIMLATVKILFTPESTEGISEGQTTAMSGENHMSVVGYRGYSVLMSVYHKEKPEYLKQAIESIQAQTLSTNDFVLVCDGPLNEPLDSVIAAKQQEMGESLNVVRLAKNGGLGNALNEGIKHCKNELVARMDSDDIAYPDRCEKQIAVFNTHSEVSICSGIVEEFTIDPHTVDTRRVPPETNAEIVEFAKKRNPFNHPCVMYKKSAVEAVGSYQDFYLLEDYYLWLRMLMAGYQGYNIQEPLLHMRAGSDMYLRRAGWKYAKTQAKLFKFMKQQGFIGEGQYIKSCVIRSGSALAPNWLRKFMFERVLRDAGMQAKTENRNQFVDIMRGIAMLLVVLQHTMSGCTVGAENTFVFNIAWSLQMPLFILISGYVTKYSRPISDGKGLWKYVKRRTVAYMLPWAVWSFLVRGIIFGEDSFLNVKHLLWNMDSGYWFLATIWTISMIFGVASFVAERASKENLLKKQIVLLGCYLAGMVLLVGIGVILGLSFFAIKLTLYYMPFYYAGFLYGQFDDRMKESETGKKMIDSVVAICFVMWLFVILRFPLYEMSDGGFAIILRAATSLAGCIAVCGLCKGIFSEKSGGGYPCVGRRALTGSVPHSLSATQLNQAGRSTNSIQSDRAEHGSGQLCDYGSTYCDGNSDDESKCCAEICINRKEKVRDVFLWAGKQSMEIYMMHGLLLNIFKSSAVIQFSSIEGYLLAAGNFALTIGLCAVVIRLLNQNVVLKKVLNIRMHPRVLIVGTVPYNTKSTSRAFDAYFHYWEKENLAQIFSNTKKPCKGHCETLFQVTDHRVLQRWMGKKVDTGVIYHYDELDTEWLDNDLELGDAKAEAAYKFGGKHTPLTHLLRGILWRKRFWCTEKLNNWLDNFKPECVFLAFSDDYFIPQIAMYVAKRYNVPIVSCIGDDYYFNVEKTLNPIYHLYKSTYKKLIDKVLAWPGSAIYISDKIRDKYNSEFGLDGETVYLTSTVQRKPFSVINKDCPVITYFGNIGMGRNNSLNDIGYALGKINPEYMLEVYSNEKDEQVYSVFKDNKNVKYMGSVPYTQVQKRMAESDITVIVEGFEEKDINLSRYSLSTKAADALASGASILTYGSLESGIIEYMQSTDAAMVCTDKAKLVDSITQLISNQEIQKKYYEQAIVMTREHHNLQASCKTSENVVAKAIQHMKMENNFSIIISTCDKFSDLWDAHVLLLNQNWADRNVETFLVTDKPTDRTFENVTVVAAGEGTEITERLRAVMPLIKTEYVLFTLDDYFLTERISTQAINEDIQIMEKHQIDYLRLFVMTMKSLRNRKAEELEPDIFLLDNYAGDYIVSLYAGIWRKDFMEKTLTKTLNAWQYEVALTNMARQLNARCADSRRGEFPILDVIRKGKVLTKARKYFDENPIYKGDREDMRAKDEWMLEFRTWLREWLPKPLFNLSKAIMRRRGYKFFSDNQMRIVQINGGAKGSTGKIMMGIADVARAQGHEVMCASPITTTNRDAGEDCGYYRIGTFNSRRVNVALARITGFNGCFAWFETYKLLKKIDEFKPDIIHFHNLHDSYINLPMLFSYIKKHNVPTVWTLHDCWSFTGQCPYFTIVRCDKWKTGCHNCPQYKEYPASFYDNTKRMWKLKKKWFTGIGNMTIVTPSKWLAELAKESYLKEYPIEVINNGIDLDVFKPTPSNFRERYGIPAETHIVLGVSFAWGYRKGLDCFVEMAEKLGEQYQIVLVGTDDEIDKNLPQNIISIHRTQNQKELAEIYSAADVFAMPTREENYPTVNMEAIACGTPVVTFNTGGSPEMLNEKVDRVVPVDDVNEMMSEIKNICTGVGDKGRMNGLDKLSMKIKFREYITLYNMRCNKMKVVFVVSILYIFLYAMYLNLSFAFGKIRDPRRDNMYLCILVVAMAVFGSSINPPSHGWDLYRHYQYLEALRTANYSFTDYMFNFDNILGGGTRSGLYGFKLYFFLMSRFKSNRLLPFVTLLIVYGIWCYITQDWLQKKNRTELLAPSFLFCLATMPYVYVNTGIRNGLAASIVALALYREFEKNGSPIVTAMLLVFSCTIHNAVIIVIPCWILAHFTVKMRTIFILAIGLALLEPVAQLIYAQSIPGISQAANLYLRYIKSDAYFFSYGYLIVDIIFILLITYAFYHVNKRDNSRLLYRFVLIYALVIMTQIGHYDLVLRPMYVLAMLSGIIVNNLYSYFRSYLGKNVISVAIFCAWLTAVVIHGPAYLLMSYLMLMIIGSHLALHGVQSDWNVWSAGNRINRVFTSFLKPGGGIGVAVFFMITGYFNVCKEKVSAKRTIQVTIFYGFLCGMIGVLQIVRGNVSTDSIKSILRSFLSPVMGGCWWFVTAYILLTLISPTLNKYLSNIGSTKFLLVVGAFWLFEYTVGNITTNQYFQLQRAVMFYLIGAYLRKQNTSLGRKIYYIMGFALTYCLNGIVQYFSDAAISAGKTGITNEITVFASSCVINSVFVIIEAICLFRLFLQININSERIVTIGRSVFGIYLLHDSPFTRNVIWHDIVKIENLYAMKNYPILALLTTICVFLSCYMFEKIRNTYLEKPIEKGVHRCYMRIGSFLNFDREYMNKVAKNAVWIIGIRVVQAVVAMLINMLTARYLGPSGFGLITYASSLVAFVLPIMQLGLSNVLVQEIVNNPNDEGKILGTSITLSFISSICCIVGVTAFAFVANPDEPTTILVCFLYSLILIFQAFDYVEYWYQAKLMSKYTSMISLVAYIVVSIYKIFLLVNGKSVYWFAISNALDYVLISSGGLLLYRKLGGSKLKFSIETGRMMFEKSKHYILSSMMVTVFAQTDKIMLKMMLNESATGYYGAAVTCAGMTGFVFTAIIDSFRPSIFEGLKDGKDVFRHRLTMLYSIVIYLSLAQSVVMTLFSRWIIFILYGTAYNPAISALQIIVWYTTFSYMGSVRNIWILANDKQKYLWQINMFGAIANVIINVLLIPRMGINGAAVASLITQFFTNVVVGYIIKPIRGNNKIIEEALKPKYLLDAAKKLRKSSMSAFDNATLMITGGTGSFGSTVLKHFLDSDLKEIRIFSRDEKKQDDMRHELQAKHPETAGKVKFYIGDVRNPQSIRDAMPGVDYIFHAAALKQVPSCEFFPMQAVQTNIIGTDNVLHAAIDAGVKRVVCLSTDKAAYPINAMGISKAMMEHVIYANARVAAERGGTTICCTRYGNVMCSRGSVIPLFIDQIKAGNPITITDPNMTRFLMNLDEAVDLVLFAFQHANPGDLFIQKSDASTIGDLAKAVQQLFGDTGTNIIGTRHGEKLFETLMTREERLRSQDMGHYFRVAADNRDLNYDKFVVKGEVHTMADESYTSHNTTRLDVEGTVKKILTTEYVQNALKGMLGIFSGKNIYNFAILENLRIFQNCLFTGGVVTANGICSAAFCESAALRTCRSPLGELSRSDMKKVISVRFKENGKSYYFDPGDAVIHTGEYVIVETARGVECGEVVQGVLELADAAVPKALKPITRMADSVDIRRMRQNREDEKRAYRTCQECIARHGLEMKLVEAEYTLDRSKIMFYFTADGRVDFRELVKDLAGIFHTRIELRQIGVRDESKMIGGLGICGQPFCCSRFLKDFQPVSIKMAKEQGLSLNPTKISGACGRLMCCLAYEESAYEYLNSIMPMVGSTVRTPDGLGTVLEVNPVSGYLRVRCGTESLAPRYYKVGVCEYVSGGKRPPRRPDPDDDYSGVRNPAPVVASSDDEKRPACPRRRASEKEMAHKVSDACVGCGACEGACPVGAITIENGAAVVNADSCIDCGACEGACPTGAIAAEMKQKGGGCAAFCAVPLLRWTIRNGRRVCFGHVQRKNVFDSAVRRVCGRAELRFSMEHSTEVLYNRTMVYCTPEHRFGSDALLLARFCEPKRSQKAADLCSGCGIVALEWHDRGHRGPCTALELQPEGSALLAAAVEEQQLTHITPACADLRTWRQDEGQFDVCACNPPYFTEGPQSKNAAHALARHENTCALEDVCACGFRLLKDGGRLALCHRPERLAEVLAVLRAHRLEPKRLAFVKNAPENAPWLFLVEAQKNRRTGLRVEPDVLIRAGAALYGRMAGTLYIVATPIGNLEDMPPRVAATFGAADFIAAEDTRVTMKLLNYLGLKKPMVSYYEHALQKGEAILQRIEAGESCALCSDAGMPCVSDPGEVIVRDALARGIKVVPIPAASACVTALAVSGQDTSRWVFEGFLPVNRKQKKERLAELLQEKRTVIFYEAPHKLRTTLDDLTAAFGAERSITLCRELTKLHEEIWKTTLGEAVEHYRAAEPRGEYVLVMAGAPAGAADEEELTLEQAAQRAFALTIEGFSASAAAKAAAQGTAYSKSEVYKQLLLLQQTAEMTKLLVLSDSHGARDAIKRILNKEQNNVDAVIFLGDGLRDLEQALAFFPHLRVYSVAGNCDYGALEPLDGLAGFDQTVVFYTHGHMYGVKYDLDTLADAAAARGAEVALFGHSHIPHAEQRGNVFLFNPGSCGRCYTGPDTYGLLTLENGAVTAYEHKEVPKQMSINEVRYLPECGSTNAYVKEHFEEFGPVAAVYTENQTAGRGRLGRSWVNAEGKALYYTVAIKEPLAQPATLPLLASLAVRRQLQLRYGVDCQIKWPNDLLLNGKKIVGILCESVSYGYQQQGRGILCGIGINLAQPQSYFDAADLPHGTSLALQGAAVDLSTDPAWLAEGLTDFGFDRNLYTFARDGFAPFREEYKAACINLGRRVTFDLPDGSQGAGEAVDVDAEGRLVVRTDAGEQHVFTGEVSVHGIYGAVMLHNTFCRRLAALVLTLAVAVSAVLPVFAVYPMPVQTATETEAVYLFNADTGKTILNQNADQQKYVASLTKLMTALLLVESGKDLNGEVTVPTDLTQEFKDIQNANGTTIGLRIGETVRRIDLLNAMLIVSANDAASVIAWDVGGSVVGFVQQMNARAAELGCTGTNFTCAHGLFDYGNVSTAQDLAKIAAACAENQTFAQVAGTASYVLPATNLRKAEHTISSSNSLMNSESANYREYVQWVKGGFTTLAGRCIVAFAQQDGHNYGLVILGCDTLDHLFTACDDLFDWAFASFADRPLVDTQTVLTTVDLNKCRTEPAVELYAAAPVSGYGHSDDKVSYSFDLPESVSATVKEGQKLGTATVYLDGYEVGQVDLVTHREYVSDFRTDIKATLLLLCALILILCALGFVTLRCGGGLTLNQRRRQMKKRRMFLSFCGKTPRDEGAAFVAPSATVQGDVVLKPGSTVWYGAVLRGDDGTLTIGKNSNVQDNAVLHCDIGGCVTLGENVTVGHCALVHGCTVGDGSLIGMHATLLNHCMVGKNCIIGAGALVPEGMVIPDNSVAVGVPARVIKQVSAAQVEANLHNAAHYVEHGKLHAEQLKNGMMLDRMEGNAELKTSVQQMLATRRLTHSVLLVGEAGLGTGFAARCIAADYLYPAGGAAAEALLRGECCRAVAKAGKRDSGTVETGIVREAISVSGMGSGGKYLVGQVTAMRSEIFNTSLSAEGRAVLLYHVERMNEESANALLKVMEEPPEGVLFLLTADSLASVLPTIRSRCVSFAVAPVSPADCTRYCAAQGVDKKTAALYSELFDGHIGTVLAVARDEARAAQVEKALELARAAAARDSYTAAVLLAAYEKDKAAASALLTDFRAVAAAGLRSSPRAPVQGTQARQAVRLADAALQRLGAQVNPKVVLSVFAAKLRTLMNNWLNKLERKYGRYGIPNLTNILVAGQILVLAIELFIDRTITGWLGLNRFLLLQGQVWRVISFIFIPFSGGSILSVVLGIYFTWFIGTALEREWGDFRYTVYLLSGVLGTVLGCLLTGVTASTYCLSLSLLLAFAMLYPEVQLLLFFVIPIRVKYFGVFAAVLWVFSFLGASLPGKLDYLLSMLNVWLFFAPMAYRSLRAWVRREQWKRKNRRMDYPFWNELFTFSTGFSTVFVKKKRSFQRCFPPFPHSFPHPVEESPIQAVMDAAAFWKFVGKNVGILPFIKKKVEGFSFVFTVYSGLRVCFSPIWNLTPGSFPQTAGEKSPVWKTDTNGDFPHCFYPGMKKTRRFVALLLAAVLALALFTACGAAEQPQSAIGKVYEDWFVEQINSKRPGKPVQKVDVKHSDMMVALEKISEDGKFKARDGGDHEANGRGFGESWYWMILSDPIALNVSGESTVEAVKLTLENLTQYGPVYFIDEQQLYRIDEYDIVTRVMDDKTYVAVYLHLEEAKIMPDGLRTARHFCIQPFGAFAQKDGDILYALSIDTPRVMDMEEKKLETNTEQNLPVQELPSDIPAEVRQKLAEDLNEEATEDLKQDMREAEREEANDEEVKANPEMLTKSRLLKLLIKKQYVKLREVTEEEQPADLAELLEELDENNRLVVFRLLKKEVATEAFAYMSDEARDDLVNAFSDVELVSAIEEMSLDDAADLLEDMPAGVVKRVLEKSSRETRESLNKLLNYPESSAGSLMTPEYVRLRMDMTVEQAFAAIRKQGENAETVYTCYVVESNRLQGVVSARNLLLADPKTPITEIMEDNLVTVKVTDDQEFVAREMQRYDFTAMPVLDNEGMFVGIITIDDAIDVLTDESTEDMQKMAAILPDDDATTYFGTSVWTHAKQRIPWLLILMLSATFTGMVTTHYEEAFVSLPLLVSFMPMLMDTAGNCGNQISTLMVRGLALGEVEPADFMRVLAKELRVSAIVGAVLGIVNGLRIYLMYTFLFPGQYANVMGYAIVVSVSLFFSVILAKLVGGMLPLAAKKLGADPAIMATPFITTIVDACSLILYFQIAQLVFRNMMMQQVGKQKTRRPVPECRKCSRFRARKAAPFLFRGLFSKPPGAKRRTQYFLLSDLPHRWIYFDYDQGPLSCVHLPVFVNSTAAAPAPGAALAISFFIIAPQKNGVNPKAKFCKDFCSVLQKQNTLLRVAAHREGCFAWILPWCEEESCYLGSGCGPASHGKSITAFTIHFVKKLMSDCAFLNNSGNFTAFTYNGRTIRFRTPSSLERYTDILEWDKGYLVVMAKYKGAPAEEEYIDLVPILNNLYIDADAFLKPIRKVELQYAMPDILSVADHADMIVNGYAFSKSNDSVRVLNLNNPASACVLSADGKVLETTMDDIELAIVQDYYSRNRKHLEESMPKYYDFKICGYYLYFTAHCIIECMHVHASDRKLTEGGSAKFFVKSNGDTVIQNRGVLTDRELSKIQSFIKDNYKEMYLKWASMSENGFFGENMQRCGTVEFAFAVPEQAERFALYLTERSKNLISFPSFCAGAMPRAKQTMDGNTAAAHVAYAYTDVAAIYPITPSSPMADSVDQWSAAGQKNIFGNQVKVVEMESEAGAAGAVHGSLGAGAVTTTFTASQGLLLMIPNMYKIAAEQLPCVFDVSARTVATQSLNIFGDHSDVMACRQTGFAMLVESSVQEVMDLSPVAHLCAIEGKVPFLNFFDGFRTSHEYQKIEKWDYADLKEMCNMEAVEEFRKKALNPESPKMRGSHENGDVFFQHREACNSVYNALPAVVEKYMAKINAKLGTNYDLFNYYGAADADRVIVAMGSICDVADEVIDYLNAKGEKVGIIKVRLYRPWVSSALLKVLPKTAKKVAVLDRTKEPGSLGEPLYLDVAATLREAGLNDIVLTGGRYGLGSKDTPPSSIFALYKELEKDQPKERFTLGITDDVTFLSLPEVKPAPITAAAGTKECKFWGLGGDGTVGANKNSVKIIGDHTDKYVQAYFQYDSKKTGGVTISHLRFGDKPIRSPYYINQADFVACHNPAYIHMGMKMVQDVKPGGVFMINCQWSDEELGQHLNAEAKKYIADNNIQLYTINAIDKAIEIGMGKRTNTILQSAFFKLADVMPIEDAVNFMKQAAQKSYGKKGQDVVEMNWKAIDAGVDAIHKVDVPASWSNPEADPAPKALAGRPELVKQIRDVMEPIARMDGDSLPVSSFVANANGEWEQGASAYEKRGTAVNVPEWDAAKCVGCNQCAFVCSHATIRPFLLTADELAAAPAQTKSRDNKLTPEYKFVMAVSPLDCMGCGECVTVCPTKAITMVPQDSQADQQAVFDYCVANISKKATKMADDTVMGSQFNQPLLEFSGSCAGCAETSYARLITQLFGEKMYISNATGCSSIWGGTASISPYTVNKDSGHGPAWCNSLFEDNAEHGLGLYIGQKTIRENLIKEIAEVAGSDKASAELKAAYEKFIATKNNTKANDEPAKALIAELEKAAAAGCEKSAEILKSKQYIAKKSVWIFGGDGWAYDIGFGGLDHVLASGEDVNVMVFDTEMYSNTGGQASKASNIGEVCQFAAAGKEISKKSLSEIAMTYGYIYVAQIALGANMNQAVKAIAEAEAYPGPSLIIGYAPCELHGVKGGMTNCQNEMKKAVEAGYWNLFTFNPANKAQGKNPFTLTSKAVDNEKYQALLANETRYSRLTRAFPERAKELFARNQEVANDRYEHLTRLVELYKMLSVYGKVRFVVNKDMINTRGEETPLAKKSQFLEATVGKNRKSASLLALTHMNDTVHFEKTLSSETLFEGRVITLTKDTALLENGKTATREVVHHHGGACILPYFADGTICMVRQFRYAMQQQLWELPAGKLEKGEDPFAAAKRELEEECGLTADNYISLGEFYPTVGYDTEVIYTWVATGLHETKMHLDADEFLTPDRVPLEKAYQMVMSGEIKDGKTIAGILKLKALLDEGKLMILYEDAALVVLDKPAGLSSEEGVPAALRAHWKAPDAFVGVVHRLDTGVSGLMVYARTPAAAAALSRQVTQSQDAYAVQDGRAEGKAAAPQFVKQYRAIIAGAPDAQLPATGVLRDYLFKDSRKGRVFPVSRPRKGVREAVLEYRILATAGENSLSEITLHTGRTHQIRVQFASRRHPLYGDGKYGSRQKGSIALQSCGLRFVHPDTGKPMAFSLPLPAAAPWKEFLELGEMEQQYKTDAEIYAVLEREIIDLTIRPGSSLSENPLCARFGAPRSLIRVVLQKLQENGLVRIVPYKGTTVTRLNRRIVDELIYERTAVEGRILRDFAPNATPAQRAQIRARVDAYEALARAENPDFNKLYGMDCRLHETWFAAMDKMYLWSTLQNAHADYSRFRMLDTMTTGGLDEVIADHRNLLNAIERCDLAAFEPLVERHLYGGIRRLGSKLTKEYADFFEPENMKMEWSFVFFLNSVLLGVGLAMDAFSVSMANGLHDPKMNKGTMGKIAGTFALFQAAMPMIGWVCVHTIVELFASFETLIPWIALALLGYIGGKMLLDGIRGEEAEEAAQLSAGALFMQGIATSIDALSVGFTISEYGWLMALTAAIIIAVVTFILCMAGLRIGKKFGTQLSGKASILGGVILIGIGLEIFITGVFMSVLQAIDLKKYYGTEPNITRALDGVNFSVEDGEFVAVVGTSGSGKSTLLHMMGGLDTPTSGTVIVRGEELAKKNDEQLTIFRRRNIGFIFQNYNLVPILNVYENIVLPVELDGDTVDQKFLDEIVHLLGLEDKLKNMPNNLSGGQQQRVAIARALITKPAIVLADEPTGNLDSKTSAEVLGLIKRTSAEFRQTVVMITHNDDIARLADRIVRIEDGRIVEMEQILIVEDDSFLNKMLDYNLTADGYGVTSALNARTAAEAIRQREFDLVLLDINLPDGNGFELCKLIKPQHPDTIVIFLTANDQESDQIRGYEVGAVDYITKPFVIGALQRKIKAMFAMLEHHKPAKDIYDDGRLFLMSENCYKDKYIYHFTAFLCVLQFYKRKDSSIIKLLSLRFIIAGSVMPLTQPKTDLAYLRSEKAKAEQKLRACQHREKILERQMSELNRRERVHRLCTRAGMLESFLVCPGELTDDQVMELLKISFRQPEVVLALAKMVHDVHERSNVQNPLEMVSGGSRKRIAAKQRKENAVFLGMESGWRTNASFDFIELSARPQFHRNGVMEVIPIPCPHFKITIVKRSQGQSAVAGAAYQSGERLFSEYDQKTKFYNKKKELVHAEIMLPSHAPPGYADRATLWNAVEAVENQWNSQLARRIVLAFPVEVPKEQYLSMIKEFCQEQFVSKGMIADFAIHDKGDGNPHAHILLTLRAMDEHGNWLPKARKVYDLDENGERIRLPSGNWKCHKENTVDWNDQKYAEVWRHSWETITNRYLEAAGRPERVDLRSFERQGGIQQIPTVHLGPAAHQMEKRGIETFLGNLNRDIRAANSLMQSIRSAIRGLQHWIADLNEKKRLLLDALEKAKEPTLSDLLVDYFNLRNEQRSDWSGKAKLKCTVRDFEEVKRAVDYLKAHSLNTIENLDTAISNLNQTAAPLRRQLKQNENRMRAIAQIKDAAAAHAKLKPIHDTFIKKNFKLTKDAYAAQHKEELDTFNKAVRTLMKLNGSTAVDFSALDAEFSALQSGSAELRTQLETLQPDISALKNIRKYIDMVLNKQQLSAPGGKMPEKESVLKQLEQLQQKKSNYKTISTTPNREESLMTGLRVTEVPFVKYRTIELFTCQGTYGRFLDFDGRKTSFYLVADEKGHFVALQAILMELDLSQTAKMTYALLLDRATLSQKNLWTDERGFVFVIFTICSLAEQLGRSTVSVSSALKELDAAGLIERRRTRFSSPNHIFVKIPNVEMRVVGFFSDFSLFKGRPPHSCGANTERNGWILFVFLFLFYYVGMRLIVERHYIGNVPMNTLFQRLAEEEIRKTAESYLAAGMEKDKKVTALYCRLSKDDGSNSESLSIRTQKAMLMEYATRNGFGNCQYYVDDGYSGTNSDRPAFQELLDDIREGKVATVITKDQSRLGRNHIETGTYMEIFFPEHGVRYIAINDGYDSNEQSQMDIAPFRNIINEMYAKDTSRKIKSALRTRKKSGKYISSNAPFGYQKDPADHNHLVIDPNTAPVVEYIYSMAEEGLGLHRIAKRLHDEKVLKPCYYKKEMFGRFIDGEKMYDWDNAYISQVLHSPVYAGHIIYEAKPTVSMKSKKRRYIPFEERAIVPNTHEAIIPQDRWENVQRILYSRSGCFMCDKTDYDNIFKGIIRCADCGRTMLVKVEHRRKRNSVLDQTFYCCSTYRKYGAKACDSHNLEARVLHEAVFADIQAHAKAAVSNREALVKKIANQMHLRVSSDRAQHKRDLKQCKARIAEIEDLYAKLYEDVSKGLLPEKRFQMLADRYDKEQAELTEKIEQYEREGRAEHDQLDKIQDFIDEVSKYAGITELNYKILHQLIDKILVSKAEKVDGEYVQKIQIFYRFIGPLDAIEMPSSNKVRKVTSENYPTDAGREGEAIFRRVYALAGSKLPIKRLWISGMEDAAIQQGFENLKDGAAYDNLFAASECRAKADWLIGMNGTRAFTKKYGRKQTIGRVQTPTLAMLAERQAQIQNFVKEPYYKVELSGAGVVAVSEQMAQEQDADTMQAACDGQCAVVGGIERKRVEKKPPKLYDLTTLQREANRYYGLTASQTLQALQELYEEKLVTYPRTDSQFVTEDMRKTVESLVLALDGQTVDVSCVINNSKVTDHHAILPTMQGAKCNKEKLSETKQKILSLIIWKLVQAVQPPFIYEDILVTVCCQGWNFTAKYKDVLQPGYTAKPVPLVEPEKNKNASFPNDLEQGMVIPTVRAEKKQGFTSPPKVYTEAICCERGIRNRPMKAKKTDNGKITALYERLSRDDDLTGDSNSIINQKKLLEDYAREHGFTNCVHFTDDGWSGANFERPNWKRMIAGIESGEIGYVLVKDLSRVGRDYLQVGFYTEVMFKERGVRFIAIANGVDSDKRESSEFAPFLNIMNEWYVRDSSRKITSVLHARGMSGKHTNSHCIYGYKKDPNDKDHWIIDEEAAEVVRRIYRMALESKGPYEIARILALEKVERPSYYLAQRGVGKHQSNFNPAERYTWRGGTVADILSKPEYMGHTVNFRTYKESYKDKRSRMTPKEDLVIFENTQEAIIDKETWERVQTLRKTIRRTDSIGKANPLTGLMFCADCGAKMYNHRGKAGNARDWAGRPNGKKRPDRDEYNCSRYDLGNQHYDKYCTTHLIRTAVVNELLLEAIKGVCDYALNNEAEFMAQVCSASEDRQEKAARSIRQRKQRNEKRTDELTRLIRKLYEDNVSGRLSDTLFEQMLRDFEAELSDLTEIVSQDQQELERISRETINAEKFLSLVRKYTDFSELTPAMINEFVEKILVHQAQGKGASRIQEIEIFFNFVGKVDIPHKEVELTEEEKAALAEQERRRAKKAEYNRRYMEKKRRQWKEQQEQEQAEQLPLAAEQKGEHIAMRTGLTKQEKTTDIWFDEKDPLIHIRTHNTDLKKRLAAYSGQYPDQCRQTDADPETGCMEFEIVKGRFSFRLTAPYSEERRNAASKAAKKHSGNLTHPIQKDVLMIDDEKIIEMFFGRSEQGIRELDIKYGKVCHNLSYHIVGSRQDAEECVNDAYLGAWNAIPPARPNPLLSYLVKIVRNISLKIYWRKEAAKRSSHYTIALEEIEACIAAPNTVEAEIEAKELARIIEAFLDTLTTENRVIFMRRYWFSDSYKDIAEFMGLSEKNISVRLTRIREKMKQYLIEREVFVMNAKKFSDAMSELDTKYVDEALNYKKKAKKPIWVKWGAIAACFAVIAVLGVGVFQNGLFGNKTDIATLDNGNEIIFVKSETAGSSIDIDGTITTRQLTETEAASLFPNLTVTAHAVFRVDDTVSDSNKELIGFEGKIENAKVVISTTDIALLDTKIVGSEESSEVNGTSVTAGYFVTDRNSVGEQNVIYYATFKLGDSTVYVENAGAKTESESVKNDLATIIQELINNGALDLSSFNGMTKPREKTREELQAEIEDGKKKIRQFENREKMLRQKLSKEERRTRSHRLIVRGAVFESIVPEAKNMXXXXLTSEPAREFLKKRAESGNAEMKNDNRKYLSVGIDVGADFSLMAIALPSQELLGKSYRIFHNSKRSLDGAIDRIYSVMEQYDLPARIFMESTGIYHFPVYHKMREAGLDAYVLNPLVTHASKDINVRNIHNDKFDAQKIALLGLRPDLKTSIVPSDDVAAMKAILREYYAMKKETSMYICRLKDQLRQVFPQFIPVFSKVNGVAAMAVLYEYLTPDSILAAGADELERFMKTVISKGPLHIRKKAEALVEAARDAQNFGHGNTGVFYLIRHYIEMIRLLDAQTKQILTQVKVLLKEQKNSQMAKQVRLLQSIPGIGFLSAVTLVCEIGDFSAFKRPKQLFAYFGLDPAVRQSGNFSGADLKMSKRGSPYARRCIYVLAIQSVSLRVDGTAKNPVLRSFYEEKCKSKSKMTALGAVMHKVCNIIFAVLRDERPFVLITPEEHRTAYFSASVKAAMQIFQESVPIPLVIILRAHLYTLAGVCALPRAYLRTGILPRAPIWRLCRNKGLHPLRRFAAIPAHPQKQYTRRWRLYHFCGFYYPIREVIPIAIYHWNIGIVSRGKGKSAVAAAAYRSGEKLTNEWDGMTHDYTRKGGVVHTEIMLPPHAPPSFSDRSALWNSVELYEKAGNAQLAREIDAALPIELSREEQIRLVREYCSSQFVSRGMCVDFVIHDTDKGNPHCHIMLTMRPLDERGTWAAKSKKEYDLDENGERIRLPSGRYKTRKIDLTGWNDKDNTLLWRRAWADYTNDFLERNGSPERIDHRSNAERGIDEIPTVHMGVAACQMEKKGIATEKGELNRSIQKANRLIREIRAHIGKLKEWIADLFKARETAPEQPPQSPNLANLLMKYLSVQREKSRKYSQSWQQQHTADELKTIAAAVNYLSEHGISNLDELDASLSSVSDKAYSIREGMKTAEERMKKLQKLIEYGKNYTEYKPIHDELKKLQNGWTNKRDKYEEAHRAELTLWNAASRYLHANLPKGTKTLPIAEWEQEYSDIKTQRDTDYTKLKAARAEVAELQKIRRCVDIALRADQPEQAQTRTKRHEQERMNERERIIHLWFEMWLTKQDLGIDNIFAEDVIYTESWSPKYNNRQIVKHWFQEWNTRGKVVAWEIKQFFHKGNQTIVEWYFKNEMNNGSIEEFDGISLVEWTKDNKIKSLKEFGCNLNNYNPYEHSDLPEFRDERASWFMTVRGNKWYRHSQSKGGAPVDFVMEFFGKSFTEAVELLTGEKGAAPPPDRPSPAPISDFRLPPRSPDNRTARNYLTAARHIDEDVTGFFFSTGDIYEEAAHHNAVFVGRDEDGIPRYAHSKGTAGNFRLDVKGSDKAFNFCYRGEGERLFVFEAPIDLLSFLCLFKKDWQKQSYLALGGVGEKALLRFLSDRPNIKTVYLCLDSDQAGNDACSRLAELVPEGLTVHRLIPLFKDWNEVLQHRAEITDGKYLREAIYGLKEPPQEETVEIIRMSEVDTQTVEWLWKPYIPFGKVTIVQGNPGEGKTTFALRLAAACTTGGTLPGMKPLPPFQVIYQTAEDGLGDTVKPRLIEAAADLDRVLVIDEAKRELTLSDERIEKAITQNGARLIILDPIQAYMGEKTDMNRANEVRPMFRRLADVAERTGCAVILIGHLNKAAGGQSAYRGLGSIDFRAAARSVLLIGRVKREPNVRVIVHDKSSLAPEGKPVAFCLDPETGFSWIGEYDITADELLSGAGGNNATKTEQAERLILDLLADGKELASEDIEKAATEAGISARTVRAAKRNLDGRITSKRIGAAWYHALKKMNNDTSNRSTPATASPLTVKEAAPPVMIKKIGKTTYRVKIHFSETSKETMSDKIKRLILNDSEKSSMETAGNKEFEKDTEKKGLGTPATRAAILEKLVSSGYVERKGKQMIPTEDGVAAIRNIPDYLKSASMTAEWENDLLRMERGEIKPHDFMQGIHGLLDKMLADLRQIPTVVTVPHHNKVSVGSCPVCGNPVHESKLSFCCADRSCKFALWKESRYLSNMRKTLDKKMAVDLLKKGRTHVKDFYSAKKDKTFAADLVMRVEEGRAQYSLEFPKTPMQTKTMPQINDIRELAQQNARYVSNSPQDWMSYLDVAARLYRYSFTDTLLIHAQRPDATACAEMELWNQKMSRWVNRGAKGIALLDDTGPRTKLRYVFDIADTHLVRGGRTPLLWNLDSHEHEQAILDHLADTYGLSQTDSMNAALMELAQQLTADNLDEAMDGLTYEVKDTFLEELDEDNIRVRFRELMTNSIFYTLSRRCGQEPMDVLDDDDFIRIVDFNKLPVLSFLGNAVSEQCEAVLFDIGREMRKIYKKEITQQLEKSVDSLYNTNANFSTLKRETADTTTKGGQENGVDILPQGRLSVPESGREGRAADYREVRDAAQDVPEREPQELVSEYADERQAEPASGADRGSSGEPGGNPAGQPEREVPGTEQGAGPACMGGAPEQPDGDGRGDRLEGIGVQLTKTTTEQDLSEAEEEIASAFSFPDLPTVEQQIRAIEAPIRARYADEIALDSKVVDEILRTGSNRSKGQLRLIYNFMVEKTPEEYTEFVKNEYGTGGKGFEIGGAKYAVWFDDLGLRIAVGGTAKGGTIANASLSWEDVSNRIHELLRQGEYAPQAVLDAARQNALQEHAQTLAYMERDLADGVSEAVFQDTEIFRGGFPELTDRLAGLLDDTDFLTDLNERLSALGEAYAEDKDLMRMHFYKPDKVAALFQQFAKPYQNYSARDGFHWNENKKFITEDEITAYFTRGSNYSDSLLAIYSFFLNHEDKKERADFLKDHYGIGGSSHALCGADDSHEDHDGRGISLERSSYGNPDASVHLNWNQAAGRIDRLIRDSEYLKPADYSRMPAYECERMAMQVMGFYHHLPNEVERPFPQDLYHEEGRKALVEKLADPEQAVELLEQMDNALLSVPLDSEEYERKAESLSILHQYVEGTYTIFPEKKRAVEIAVPEQGQMSMFDFMEQEPQSKEQSTAAAVENSQKAKVVARYQSTVMMQAGYIEDIAILQYSDGKFYNHYNYDEEKGTGAAETGPFNSLNDAKAVIRQTREDAKAVESFENQPKQMYSRENGSFLYLDNNHLYRIERSNAHDVYLKDMENSAVAGRVIPLPSYSETLAKNPLNDFLKLDADHTQKDSRSIYKECLYTLLEKVERSEIYPLLRDRDTTEEEAEKLIREKIEDLFDSGEVENAVYSEAIDTWAHFGEWIQEDIFQRTYQDVITDRRDAVALYQDSKDAPQWVRGMMVPYAAEEKAVEPTLQPLPLDAANEYNALKERYPDALVGYEQHGNFEFYGEDAKRVSELLGSKLLEKETALGKVEVSGFPREQWVSQAMKLWKQGESVYLSGQQEDGTHAQTKYFRREEYLPVNTTIELDDREFRVDSVDFGNGTVSLQDMTLAKEARYPIFRTEQLEYIRHLYEQADVPMEEAVEITVFTALHNAGVAYEDFSPEQMDVIYSVAEAGGELEELLNPDFPPEQMQLIADVQNRTDAISRAAAEEALEPLTQQPMTPAEVNHARRQHNLPLDSGAETEQPAQPKQKPINFRITDDDLGAGGPKAKYKANVEAIRVLQTLDAEQRQATAEEQEILSRYVGWGGIPQAFDENNAEWSKEYAELQSLLTADEYKEARASTLNAFYTSPTVIKAMYEALGNMGLSKGNVLEPSCGVGNFMGLVPDSMEKIRMYGVELDSISGRIAQQLYQKNKIAVQGFETMQFPDSFFDCVVGNVPFGNYKVPDKRYDRHNFLIHDYFIAKSLDLVRPGGVVAVVTSSGTMDKKDSSVREYLANRADLVGAIRLPNNAFQRNANTSVVADILFLQKRDRAAVERADWVDLSETPKGYSINQYFAQHPEMVLGEITTESTQYGKQETTVKPIEGADLAKQLKEAVGNIHATITEPEISDDELDVQEEPIPADPSVKNFSFTNVDGQIYYRENSFMNKVELPAVTAERVLGMIALRETTRKLLDCQLHDGSDAEVQLLQNELKQQYTAFKAQYGLINSTANKRAFRQDSSYCLLASLEILDEEKNLKRLADIFTKRTIRKPEPVTSVDTPSEALALSIGEKAKVDVPFMVQLCGKPEQEITDELAGAIFRNPVTQQWETSDEYLSGNVREKLATAETFAANHAEYQINVDYLKRVQPKDLDASEIEVRLGANWVKPEYITQFMKEVFKTPGYYAGIDIKATYSEISGAWNISGKSLDRGNPLVTNTYGTLRVNAYKLLEDALNLRDTKIYDTIHDADGDHRVLNKQETMLAQQAQESIREAFKQWIFKDLDRREDLCATYNRIFNAIRPREYDGSHIRFEGMTPEISLMPHQKNAVAHILYGNNTLLAHCVGAGKTFQMIAAGMESRRLGLSQKNLYVVPNHLTEQWGADFLRLYPNANVLVATKKDFEPSNRKQFCSRIATGDYDAIVIGHSQFERVPLSPERQKAIVERQIDDITLALADARSEDSRSFTVKQMEKTKKTLEAKLQKLNDQTRKDDVVTFEELGVDRLFVDESHFYKNMFLYTKMRNIAGIAQTDAQKSSDMFAKCQYLDELTGGKGVTFATGTPVSNSMVELYTIMRYLQYDTLQKMGLSHFDDWAASFGETVTAIELSPEGTGYRAKTRFARFFNLPELISLFKESADVQTADMLNLPVPQAEYINEVLKPSEIQEEMVSSFADRAEAVRNGNVNPRFDNMLKITNDGRKLALDQRLMNEMLPDEPESKVNRCVDNAFKVWEESAPDKGTQLIFCDLSTPKADGTFNVYDDVREKLVAKGVPREEVAFIHEYNTETKKADLFAKVRAGQVRILMGSTPKLGAGTNIQDRLIALHHLDCPWKPSDLEQQEGRILRQGNRNKQVKIYRYVTENTFDSYMWQILENKQKFISQIMTSKSPVRACDDVDDTALSYAEIKALATGNPYIKEKMDLDIQVSKLKLLKANHTSQIYSLESDIARRYPREIAVAQGQIEALKTDMEAAKPLLAQDKDHFAMEISGKVYSERKEAGAAIIEACKALKAAGTEGRIGSYGAFELHSRFDNFDKVFRLSIKGAWNYSMEVGKDPQGNILRVTNALAGIERTLPQVERRLETLEQQLAQAKEEAKRPFAQEAELAEKSARLAELKSLLNMDEKGSEDALGVDEDAAETEVADRPRQPVNYAGRVTERTADNVRKPSVLAQLHAKQSERSAEPQKSQKRKSHDIELMLTLTPINLKTANAFVQQYHRHHKPTRGHKFSIGVSDNGALVGVAICGRPVARRLDDGYTLEVNRLCTNGTPNACSILYAAAYRAARAMGYNKVITYILDTENGSSLKAAGYTCEGRAGGLEWNGTKAPKQADQYPRQMKTRWVKKKEGLHGSMAVDRKQQMKEITERLEQGVKDIFTSEMYTTYLRTMAKFHNYSFNNTLLIAMQRPDATLVAGFNAWKNKFNRYVKKGEKGIQIIAPAPIKEVEEREKIDKDTGLAVLNENGEPEMERVEYVVPCFRVTTVFDVSQTDGEPIPSLEVNELTASVKDYALLTAAIEQVSPVPMRFDEIEGEAKGYYSDADKEICIQVGMGESQTIKTMIHEVAHAMLHNSDFMKQNGEEKDRLTKETEAESIAFTVCSALGIDTSDYSFPYVASWASGKEIKELKDSMDTIRLTAADFLEKLETAVAERSAERMTAMQYAEKLIADKEQEKTIFDDEQRNLIVNFAFKLDDRAATEELVKGLAAALAEDDKEEVNRLMYDAQEKIENLPDGMIGLSEMHDYGYLKDDVLPLTKEAALEWHRAGEKIYPLFSDGTAGEFASKEQIAQHDGIFGIRTDVWKSILLEQQESYLEDDFTYPQFPFSPITREQALQLYDEGKQIYLVRTSLRPTIVTERAEIERGSDVFQIATADLELEKSREDSLLQGSEKQFGIYQITERDPEHDYRFMGLDYVEKKGMTVARADYDLIYAAPLTDKDTLDGIFERFNIQRPADFTGHSLSVSDVVVLNDGSTVKAYYVDSIGFAELPDFFKERNMNLQKENLLNEELQEIEIFDKPGLFSNGRLRDEDVPEGLYRYDLRGSDYDPGQPITVEKTVVVNHAASVLMAEELDLGAEGRLELGEEGLNFTGAELTVREFMEEQQQKRSGLIHGDSDHIAVEGHLGTWYAVDETEVGGEKFFLLEHEEHGDMAACVAVDEQGKLVAEDLWNGFDEDFQEAVQKYLSEKWNMPKKEDVVSEIIEKAAPVLDNSAQDYSDVPVYYEPFSYAKENDEVDLYRTSYRLNSECKQAIHEAIADNYDGMYLGDGAVDQVVRQYGMERVGYILANTLHHKSYDGRFSHSNKEWSEQVSTPEHNADRMTFRTDWVVDSHPAILDGFVTMFRKELEAQKEQEQPFVKQFYVVENLQAAPLKIERFGNLNDAMSQYQALPNHYMKALGVEKNPDPMPGSLDVLQCKNGLDTIVEDYKTVPGWDNPYIQNHVVQPLQGALAVQDVELAYELPDAYFHIQTCDDGFDYTLYNKDFTERDGGVLETDGDKPVQEAMTELLAEFGCDAAEGKVMDAAELREQADTVTEQQAEVLKEKLAAERPAPEETLSFYVAECLEFTFAGEFHDHLTMEEALETYDKIPSERMNADKCIGFCIEENGGFVGMYELVVNDKVQRENINSINYFRDDKLVQQAISDMEKLMAARQQSKEQERGSTKKSVLDALRSLKAKKQEQPAQEQDKPKKAKKKGMELMSNVRFDELELMLMAMFEQPTLKDTIQVLTEIQPLVAEDAEMAALVQQTIPKMQQLTELQFKGLELEWHRPEDDAGEMSSDIFVIYQIDNSEKNREYRCRSYAYQIEHGFMITADNYGTGYSGTATRGMGAEAIRKKMESINPDKFKIRKFGVSDVIGLTAAGKTSFFYVDKDRLVRFNGFFPKPQSGTYLILDEGGYQVAGQKGTWLVSDEVEVDGQRFVQMRSEQTKNPPPSIILHESGAFVTQTALGFDGEATRKMRAFMQGPKPELLHHQKFFENGTAEHAKESGTEQNYNMIDGCVNNVPKKPRRIGGRWSVLDRLHIKQAERRQKDNTPQQEQERSRKSMHELSQRSYPSDGILSVYDLILIPKWVMEEIEDSTYRSTYVEQLQAQGYPIRWIDETKMAILKHIASKNANYGSAIDYLKYQHDEFHLVPVLDESGNMLLREEFYLDGLNCNPESFDLECELLNQQYHKNNTYDEIKSHHYIISHDPRDNADHDLTGERAQAIGLEYAKANFPGHQALVCTHTDGNNGTGNIHTHIIINSLRKSDIEPQTYTERPIDCKAGYKHHLTKDYLKHLQKSLMDICQREGLHQVDLLSPAADKITQQEYHAQRRGQLNLDIANMELLGDGITPMHTTFETDKEKIRNAISDIAERATSFDEFQRLLKAEYGILVKDHRGRFSYLPVDRQKFISARALGSNYDRDRLLRIFAENARNKERNNPHWAADDPMAILFIKSDLRLVVDLQTCVKAQQSRAYAQKVKISNLQQMARTVAYVQEHGYDSYEKLSDTTNTIQSKMAKARSDAKFTEAKLKKVNEQIRYLGQYLSTKSVYGDFLKSGNKKSFRQAHAEDVAKYEEALRILKQHSPDGRFPTMKDLRAEKEQLTIQKDAQYDTYHYFKDYHRELQTVCANVDNILGTEREVQRKQQQSRKNEHSLMARPKKEKSLHRGKRVYIRFTELEYELVAGYAKDAGYPIGTFVRKQALREKLEVNYNIVADLGEIQNLTVLVAGIGNNLNQIARYFHSGGLASRGMLEELKRCIAEIRELRQEIVQLGGVYRGNSKTHRKMYQKMTHTLEDLKKLAAMELRDVNREELVDINDVEIKKDLSQRERMVDFVSQIKNPYCYLDRGMAVKISFAGENRLEDTLKKCARTHRKMFFQGNEKYNCATYLRLSRSDGDQQESNSIKNQRALLNDYMGKHPELHKFDEYVDDGYSGTNFERPDFKRMMQDIEKRNVNCIIVKDLSRFGRNYIETGRYLERIFPFMGVRFIAINDHYDSAEENDDKGRILIPFNNLINDTYCRDISLRVRSHLDVKRKEGQFIGSFAGYGYRKDPKDKNHLIIDEYAAGIVQEIFKSKLNGMSSQRIASHLNELGVLPPNEYKRANGFNYTCGFQAGLNQKWTVVSVNRILKNESYTGTLIQGKRRKINYKVKKSHDVGSENWIRVEDAHDAIISKGEFQQVQQLLELDTRTAPSQTTVYPLSGFLRCADCGQNMIRRTVTKNGKKYQYYHCSTYKNGGGCTPHMINSEKLTESVLAAIRHQVTLLVEAEKVLSNAELASGEQIGIKILDSQITALEAELERYSNLKIRLYQDLCDDVVSREEYGEMNTRFAQKIKEAQDKIQEIREKKQEALKHDTLLPTWLEEFKQYEHIKTLERRVVVELIDHIDVHSKTEIEIHFCFEDELHSITEKFMEYQAHHGNEVAEEMKWVSYTRSISSRIGEENPSNTIAEQNERIARYLKKRGCSVSEKYSDRKRTAEATEGFDKLVQDGMARKFDAVVVDSIFRCGRTLPFAIEALQRTFYPLGIQFAVVEDDFCSADKTAEEVAKYFNGKTIDKIRSEFITNRQNHFEEGTLTHRQAKYGYALSEDRRNLVLNPESAQVVKLIFQMYLEDMKIPEIARALDAQDVPSPQIQMAKKKRSRTKIKWPDSTIRSILKNPLYIGKCTLTLAKAKRELEVPAIVSETEFQKAQKKLGSTRLPSRKKARKKPNLLFKKIYDKESGKGLLCRTSEDERQQIYSFDKGYRCFSGKAPFIESEKIFREILSALEKEKMQAAHIDRVLDSNPEKVKQCMDAGLLQYRKKANEIVTHLMAKDDERTAVYREYEQGSISLEQVEEYEHQYQVAVQKQEAAFKKVMLAVNDIEKAFSHGNPWLMKFRAISIPETLERTHLKEWLDHVWIVDFEQVEVILQESEWKRFFLEEWLNNGEEDCNGKKEMARKSRKNMMPQAAVQEAVQQNEKELLRTAAYARLSVENGGHETEDSLHTQILQIHNYIRENPELTLTDTYADNGFTGTRFDRPEFERMMQDVRTGKIQCIVVKDLSRFGRDYIETGSYLETIFPMLHVRFIAINDDFDNIRQSDVDSLAVPIKNMVNSLYAKDISKKISLSYQMRREKGIPTSWCTPYGYQLNQQGNKLEATEDAKWVKLIYQWYLAGVSTNEIARRLEFLEVARPNERLNRKLHEGDDPTYNKWHPSTVLRILNSSAYIGELVSGKTQTASYKGIGLHPVEKKKWHIVENAHEAIILKSDFEKVQARREQNKERRERAMARSKATREKCYNHLSGMVYCGCCRRNMTFERRVHGTVKETHYGVFICKRKKNTTPCAYHAVPEKMLMMVAMDQIHHLVSTMCEEEKLVKDMMRGSNLDSARSIKMKENSILFRIQEAEERRLRLYEDYKAEILDEDEYSQLKEHYIAEKQRLEHELQKQRQRALELEKRIKICDAQMERMRGILNQNEFDEELVHELIKRIYVGMDNSVEVEFKCSDPYQEVLAIMSEVQNEMNDKIAIYLRLSLADGDLKKGSKDESNSIENQRMLLHDYIGKQEDLFGEIVEYVDDGYTGTNFNRPAFQKMIVDLKQGDIKVIMVKDLSRLGRDYIGVGDYIEQIFPLMGVRFIAVNNSFDSMKLNNGTPGIEVAVSNLVNNMYSRDIAKKIRAALETNWKNGKATCTNVPFGYVWNKKGGRRWEIDPEAAACVKKVFELALSGRNTTQIAYGMNELNLPTPGLYAKRKNLLMGSNPIIAPDSEMLWNAAIVWRILRRYEYTGALVMGRRKKIDVNTTSVRTLPEDKWIIAENAHAAIVTKDEYYQAQKAIRNVTPIQYKVGDDFALKGKICCGNCNRQLRHERQYGEMVFYCGYKRSAGKFSKCYGGYYREYSVNAKVARAIKTVFYALDVVNQGMQEKQSITVRCMDIEDLEKQAEAIRVEQIKLYESYADGVLLRDAYIEKKKALSEKLAALQDSIRTEKEEQECADELDEEIRALTKQASEKTYIGGLTKECVDAFVSMVYLYDDQTMKIEFNCEDVIRRALEKYGAMSKRLVAYFSASGITAKVAENLADAIGADIFEIQPEVPYTKADLNWMDKKSRSTIEMSDPTSRPAIAAKRDNMDEYDTIFVGFPIWWYVAPTIINTFLESYDLKGKTIIPFATSGGSDMGKTNEKLAPSCPGAKLLHGKVFNSYSSKADLSAWVEALSLMMNMNNLAQTHEILTPQLATKVGLTKFEFYKYVKANEYEQVRHGVYAAKDTWIDELEMLHRRCPMGVFSHDEAFYYYGLTDREPLVHTLTIYSGYNVHRLKEDGYKVYTVKKELLDVGKQIVKSNQGNEIPMYDLERTICDLVRSRSSIEVQDFNAVLKAYVGRKDKDLNKLMKYAKLFRVDKIIRNYMEVLLMGFTPEQIKGRIKSVAKQNNADARTLMRIYMMERFLERLAQSEYRDNFIIKGGILVTAMIGVAHRSTMDIDTSMKNLNLSAEDALRVVNQVKDIDLDDGVSFDVKDVSNIMDEMEYPGIRVTMNANVGRLITPLKIDISTGDVITPRAIEFNYDLLLEDRSISLWSYNLETILAEKLQTVLARGILNTRMRDFYDIRMLLDTYEDKVNKAVLKDAFAATCKKRGTDHLQEQAEEIIKIIEADEQLQVLWRAYQKKYSYAAEIDYASVISGVRKLMDWIRMTSGGLATVSASAFAALYSAFGKYDVVHIHAEGPAFFSWLPKIFGKKVVVTIHGECEIIWTTREKPDFMQVYAAMRTKNVTEKNMKVCLVGSSGGHLTHLYMLKPFWKDKNRFWVTFDKEDARSLLEGEKVYPCYFPTNRSIKALIKNTKIAWDVLHKEKPDLIISCGAAVAVPFFYIGKMMGAKLVYIEVFDRIDKPTMTGKMVYPIVDKFVVQWEEQKKVYPKAVNLGSIFMIFVTVGTHEQPFNRLIQKVDELKRDGIIKDEVIIQTGFSTYEPKYCRWSKLIPYQQMIKNVADARIVITHGGPASFIMPLQIGKTPIVVPRQHQFNEHVNDHQVEFARNVSKRMGTIIDVEDIETLGDIITNYDQIVAGMGHGMNSNNAKFNEELGKLVEKMMEEKKMIPKKIHYCWFGGNPLPEDVKRYIESWKKYCPDYDLIRWDESNYDVHKNAYVELAYQNKKWAFLTDYARLDIIYEHGGIYLDADVELIHSLDDLLQNSCYMGMEQVGTVATGLGFGAEPKHPFLRENMRPYEEQNFVQEDGTFKPPICVRVTTKLLKDQGLRGENIIQKIQDVTVYPTDYFCPLKMGTNKLTITENTYSIHHYAASWYTGNALVRKIKYYLIPVKIFVKRYILRREEMKTKIKLFDIYVFLITLFKGFGAESNNKGYVLAFVIGCIAIVTKMARERYTTKELMAVLSIFLIGILDFVVGHTTTILFTAVAICGLKGVEVRHIVKISLWTRVFAFLCLTIGSELGIVENKIIPFWRGGSIIERYALGYSHPNMAQASLTVIIVLALYLYNKKMHIWQYLAFGLLSYLVYTLTYSRTGLLIAWICILIQMLCRNEKIKKKVVQVCKYSYLGFFILTIGMGIAYGKVSIMTKIDVLLTGRIQYISELIRHGLPPLIGTTQFNSFVNIDNGYIALLYQGGILAFVWFSYYIMKTYRQCLKNGMYDECTFMFFFFLYAMTESFFPSIAVNTSLLLIGISIFGDRTRNQIKMKELTIFTPTYNRCAKLRKLYDSLVGQTDKNFIWIIVDDGSTDETGKMISEWKKSSEFEIKYIYQTNQGKHIAMKRAFEQCATDWIICVDSDDYLASSAVQEMLTDMKSVPSDCIGYIYPRKSKSLRASSFPRESMQISIMDASNIYGMVETAILFKSKYLKLIEIPQYQDERFLSEEILYIQLDKFGKFCTRNQAFYISEYQSDGLTAHIFQLWKKNPKGTIRLLNDRYHYSNKYAGDFALKQKVKAILNLNGVCISTKQSIWKYTPNMLLSALLYIPSIVLAEIRFSKMSSVNRGLVSIVIPFHNAEKYIENCLNRVKEQIYKNIEVIFVDDGSDDDTVAILRKNSDPRVKLISLQKSGVSVARNAGIHEAKGEYITFWDIDDKPHSDFVSKFVEDICEYKVDTVISNYDDVFAGEKHVKVVLPWENQVIEKDDIDNVLIPRMIYQLKNENAIRGLVWRTFTRTDVLKDNNILFDKEITMAEDFIFTLELYHKSKNIFVEGDSLYDYIRSSTSTMNTYDKNCVDKSIIFHKKVVSLLKRLKLYDANRNRYEANRLSMYSVSISNCVRNGIVHESALSDLQRMHEMLKNDNIRIWQSEAPLKIKVTGCLLKLKMYRLLIVIYTLKEKRRISKYNMETKSIRFNLLMNVILKASAFIFPLITLPYVARVLGVENNGKISFATSVISYFSLFSQLGIPTYGIRACARVRESPQKLKQTVTELVTINAIFAAIAYITLAVSIFIVPKFHEQSTLLMISSARILLTLIGMEWFYQAIEQYQYITVRNLLFKFISLLLLFALVKKPEDYLLYCGINIFGVYGSYIVNLIYSQKFISKDKIERLNLRQHMKPIFTFFALSLAISIYTNMDTVMLGFIKGDVEVGYYNLATKIKDVLVAALTALGTVLLPRLSFYYSTGESHKLKKLLGKSMHFTALTTIPAVLFFNIISREAVLFLGGEQYLPSVACMQIVTLAILPISFANVACTQILAPMGRERYTMYSTIAGAFVNLVANSVLIPQMGASGAALGTVIAEITVAIIQIYYARDFYLPLLRKKDFGKIAIGCFAAIAALGLLNQVISPDVAIVKIAVEFGVFCIAYAAALLLLKDSIAINVLDNIRHRLEKLKMNTTLLIMAAGIGSRFGTGIKQLEPVDASNHIIMDYSIHDAIEAGFNHVVFIIRKDIEKEFKEVIGDRIAFICSSHNVTVDYAFQDINDIPGTLPEGRTKPWGTGQAVLAAKKVIKTPFIVINADDYYGKEGFKAVHEYLVNGGKSCMAGFVLKNTLSDNGGVTRGICKMDDQNNLTEVVETKNIVKTADGAEADGVSVDVDSLVSMNMWGLTPEFLDVLEKGFKDFFEKEVPSNPQKAEYLIPIFIGELLEQGKMSVKVLKTNDTWYGMTYHEDVTAVKGSFKEMLENGVYKADLFSDLMKETIDLLGKILTNILTALYEPFGFSLLFSFLAMFFYLYAYESIGTGKGWKIAMMTWYQKFKEDVFFRKLFFLAFVTSLILFRTLLNRQNPLSDVMGDWGIWETVNGEQKLTTECIENVIMMVPFSAVVMWTFGEKIGNGWKKILRYSGKIAFIFSVSIEMLQLLMRLGTFQLSDIFYNTVGGVLGDVCYCGTMKARKRLMTIASVVITKCGLVMFDVDQTQMSTLFTTTAQIVGGLYGLTLTAYVFFVDKFRDSTKDDETLYDATNAVLSNLFAGLISISILCEVIIVTSLFGIANLSRLSSVEYWLINENVLIFVLEIVAILFFGVQLLDPKKLDKELNRMKRADDKKNSTQNAPAKKENVAEFFELYNKLEADILSIAQHYVPVDFLKGRAGKPGIIRGLQILNESQIINNNVRVLIDDLRKYRNSVAHGLECSVTDSRLEEVRNIESAMGQISLLLAERKENTEDWENAIKRLYDLSSQLMYQRIRDLREDRDLLQKDVAAYLKCTQVCYSNYETGKRDIPTEVLIQLAGLYHTSTDYILGLTDDSAPSIPRKAMKLEFRQTVTCNHLTLARVCKTIDWQQPLPRCGEYVAGLDTLDGEPELPVRKLLHRAQDGGCLAELPGFNIAQLRLSYRELEQLAAKKGWTLQKLMKQGIHPNYVDCTITCACGNVIKTRSTKPEIHVEVCSKCHPFYTGKQKLVDTGGRVERFNKRFGRKMIEVSHLSKSYGSRPAVQDLSFTVPDGQIYGLLGPNGAGKSTIMNILTGYLAPTEGEVKVAGFRLPEQAQQAKACVGYLPEQPPLYPEMTVQEYLDFVAELKGVKRAQRKQQVLAAARRTGLEEVLPRVIRSLSKGYRQRVGIAQALLGSPQLIILDEPTVGLDPAQVIEIRNLIRELGRAHTVILSSHILSEVQAVCQQVLILSKGRLVAVGSPEELGETLNPGSRLRATAQGEPDTVLAAVRSVPGICKVELESAADGQVTFTAESEDAADRRAAVSRALTEAGCTVLALAAENRSLEEVFLALTEKTPEQEAPAEGEENMLAIFKRELRSCFHGMIGAVLTAFMLAATAIYFVALNLGYGLPDFGYYTLCRTIFVLLLYIPVLTMRSFAEERHSRTDQLLLTSPVSVGGIVLGKYFALCVIFALPCLVDAGMILVLKALGATGTSTLANFSALLCYYLMGCAAIAIGVFLSSLTENQIIAAVSGVAALLLAYMMPSLRTMFTTGSAVALALFTAIAAVLSVVAGLRSKSFTLGCLSFAGCCVALTALFLLKSSWLTEAFSAVLNALCLFTPFEEFVNSSFSIPTLVYYLTVAAVFLFFTAQGLEKRRWNMKWNKNAASQKGRVFRSGLLSTAMLAAVLVLAVLLNLLVRAIPAKYTEFDLSEAKMYTLSDSTKALVEGLEKDVHIYYLCETGSEDAIITKLLDHYAAESGHLSWEQKDPTLYPTFAAKYGAENVSTGSLIVTCGENSTVLDAADLYEYDYTDYYTTGSASVTFGGEKQITSAIYKLTAAGQSHAYYTTNHGEQTLTDSLTDALDAQNIDAQPLDLLTSTIPEDCDLLIINAPTSDFTAGDGLVDEISQLQNYLTAGGKLLLTSSVYAQTPQLDAVLAQFGLARAEGMVVEGDSSKALYNSAWSLLPDYGTPTESTALNGVNTSTHVMLSVAQGITVTETENVTAEPLLNSSSSAYAKADINDLTTMEREDGDADGPFALAVWARNEDTGAEILWIGCPNMDNEQLYQSMPGNLTFLQGCAASLVGQDVLVDTKALEAEPITVAGSTAAALGLTFVFVLPAAVIIAGAVVVLLRRRRMKTKPCVLLALLAAAVLLGAALWAMICSNAKAEQAASVAAEGSIPLSSFAAEDLEQIEYTYNGQTYTLQYSGGSWQLAQDPAYHLDESACNTMRTALMALNAKRSLTPQAGEDYGLNSPQLTVTVTAAGQSTTLTFGAENPVTEDLYVQKAGDDAIYTVSGNKAACFQLDKAGLFGSFCPTGLTASAITQVAYTLADGTSVTLNAVSEPTENADSASSTAYETVWRLASDPTASLAQDKVQSLLSALCTYATAQTTDADLAACGFDAPVFTAAVTSEDGSTVQLAYACGTDGWYLQVEGDTSVYTVDISTVQALLLTESDLKTQEMDNSVVVSLRDIVVEFDGQRILDGLNLDIHDKEFVTLLGSSGCGKTTTLRLIAGFLEPNAGKVLLKGEDITGVPPYKRPVNTVFQKYALFPHLNVFENVAFGLRLKKLDEDTIRRKVRDMLEVVGLKGFERRSISQMSGGQQQRVAIARSLVNEPEILLLDEPLGALDLKLRKEMQLELKRLQREMNITFIYVTHDQEEALTMSDTVVVMNGGKVQQIGTPEDIYNEPKNAFVADFIGDSNIVDGVMHKDFLVSFSGVDFPCVDRGFAREQSVQVVVRPEDIEVVSPVEGQLVGVVNDVIFKGVHFEMHVECEGREWLIHSTRACTPGETIGMRIGPNEIHIMARSEGMKIYDKKLAYPYFVWMVLFTVVPLFIVVYYAMTDAEGNFTLNNLTSISGYGSVFARSLLLALIATVICLVIAFPVGYFLSRLRVNKQHIMLMLVMLPMWMNFLLRTYAWMGLLSVNGPVNTLLGFIGLGPYTMLNTSGAVVLGMVYNYVPYMILPLYTSMTKIDQSLVEAAQDLGANTTKTLVRVLIPMSVPGISTGITMVFVPAVSTFVISRMLGGGSNLLIGDLIEMQFLGNSYNLNVGSAMSLVLMIIVLLCMSFTSSFDEDEMEGVSMKTKHLRLMQRVYIILFFCFMYLPIAYMIVFSFNQSKGYSLFTGFTFKWYRSLFTNASILHALWVSVEVAILSAIIATVLGTAASLGIASMSRKSRLLVTNITYIPVVNPEIITGISLMLLFVAYQRFAAQSAWLPDNIMGLPTLLIAHIAFNVPYVIFNVSPKLKQLDIRLYEAALDLGCDPRQAFFKVILPEISPAILSAFLICLTYSIDDFMISYFNCGTVETLPIAIYSMTRKKVSPEIYALSTIMFVVILSVILVSNAMESRSYRRDQKTLRKEGARMKRIAALLLTLAVALCAALPVLAAGTIEVTEDVSVSDDYDWTRFKGQNVTLNVYNWGEYISNGSDDSVDVVAAFEKLTGIKVNYTTFDSNESLYAKLKSGAANYDVIIPSDYMVAKMINEGMLAPLDYENIPNFQKIDAGYRNPDYDPQNAYTVPYMLCTTGIIYNTTMVDEAPTCWADLWDEQYAGNILMFNNSRDAYAIAAFKSGHSINPAAPEEVDEVVEELKTQKPLVQAYVMDEIFDKMIGGEAAIGVYYSGDAITMIDDNPDLAWVFPQEGSVLSVDCMAVPAASEHKEAAEMFINFMCETDIGKANSEYIGYTTPMHDVWEVLDEDLKTSEIAYPSEEDAAREKVFTALSDEVNSELDLKWSEMKSYDEGGGSYLFLLLLLAMLALACFNIWRKVRRKTRNQYMEQFYYQGTAVVENADADCHSLLKASALLRYVEQISSMHARKFGMDDKFFEDHGVAFLVGKQALRFNRVPRRGETLTLCSRSEKALRGSIKRITTLTDEAGQEVAMVDSRWIMSSLEDGHILRQPGWTVEGYWNETVEEGLPLLLHKRRDSLTSAGLVTARYSQCDLHYHINNAFYLDIVCDALPQEIMRDHVVKFASINYHREVPMGQQVEVFYTPSDGGWYFIAKHADKTAFECYLELEPVKQMSKTKELFCTFFKIGAFTFGGGYAMVALLEHEFVEEKRWLTREEFLDMVAIAESTPGPVAVNSATYIGYKLAGVAGAAASTLAVCLPSFAVIYLISLFFDRFLQLTVVANAFKGIQACVIYLILSAGVKMLKNLQCTPFNTAVVAVVLAAMVGCSVLAVKFSSICCILFCGAAGVLAYAVGQGKKGGTKMILLELFWNFLVIGAVSFGGGYGMISLVRETVLGHGWLTESEFLSFIAVSESTPGPLAVNMATFVGASQAGLAGSLAATVGVVLPSFVIILLIAAALHSLMKYAGVNAFLAGVRPCVVAMILATACTMGLSTLGGFTTVSGGFAPDVRALAVFALLGILHFAYKKKTQKAPSPIGMILLSAVLGAVLWSIMNITVYLGASLGNDPALPQAVQQLGRWIGESGNALVYGGSKSGLMGLLADSVLAAGGRVTGVEPKCFLDAELQHEGLTELIVTEDIPARKTKMIELGDAFIAFPGGTGTLEEITEVISKLSLGQLDAPCILYDLNGYYQPLHQLLQQMITMGLSTPARQRNIAFAADLAQIRAILEKMKLKNICIAVVALALAAGMTACGGSASSAAASSTSEAASASTAVSEAASSEAASSEAASSEAASSEAASSEAASSEAASSEAASSEAASSEAASTTAAMCLYYPHLQYNKKDFMSIFQVFLFLYFPPGGTGSIPCFIFAKKSFTFGETLMKDFDFGYFGTGDEGYAQYMTAFERNFSTDSTDSFASDDADCDADSCDSTEDDFMNRIVFTLCVWLFPAACTALGAAGVFLLRRQARPATRRILCGMAAGIMLAASVWSLLLPAIARSQGRAAWVPPALGLILGAVGLLRLEDAAGQLLAGGPGHCGRMVLAVTLHNLPEGMVVGLAAALALHGDADAVSGALALSLGIGLQNIPEGAAVSLPLTQSGRTRGQSFAAGAASGLVEPLGAVLAFVLAEWVGAALPWLMSAAAGCMVCVTAQEMIPEAVEPDEVAGVISIVLGFALMMALDVALMATTSRSADLTSGPMLQKIILFSVPLAASSILQLLFNAADVVVVGRFAGSTALAAVGSNGSLINLLVNLFVGLSLGANVVAARCFGARDEKGVQDTVHTAVALGLVSGVLLAVVGFCAARGLLELMSCPEDVIGLSALYLKIYFIGMPMTMLYNFSSALLRAVGDTKRPLYCLAAAGIINVVLNLVFVIGFSMSVAGVALATIISQTVSALLVTGMLVREKGALRLDLRRLAFHAGTLKQILLIGLPAGLQSTVFSLSNVVIQSSINSFGSMVVAGNSASSNLEGFVYTAMNAFAQAAVTFTSQNIGARKYHNLDRVIRNCLLCVVVTGLVLGGGAALAGHQLLRFYSSDTAVIATGAERLRLICGFYLLCGIMDVLASSLRGLGYSVLPMVVSFVGVCVLRLVWIATIFQLNRTPFMLYISYPISWALTALVHLACLLVVRRKLRQKQPQTIMYRNRIKRLLDILLSACGILCLSWLLLLLAIAIKLDSPGPVFFRQKRVGIGKRHFQILKFRTMRIDTPHDMPTHLLHDPEQYITRMGHFLRKTSLDELPQLWNILVGDMAVIGPRPALWNQYDLLAERDKYGANDVRPGLTGWAQIHGRDELEIAEKAKLDGWYVEHISFGLDVKCFFGTITAVLKHDGVVEGGTGTLHDEKMIYYMETPEPWLTLRCLHFYRKHSTERLKLAYLLIYPLKSVMERTYINEAQKAIGGTVKVQGFIENLRNSKYMAFIVLKDITGKLQITVEKADHPELVDTIDQLTPDSVITVTGKVMENDYVKMGGVEMIPESIEVESTANALPIVRKEIAATKKKKAVERSSIDQRIDYRWIDLRTDENQLMFKAQSCFVNAMRKFLLDRNFIEIHTPKLIAAASESGSEVFKVDYFDRNAYLAQSPQFYKQMAMAAGFERIFETGPVFRAEKSYTNKHATEFSGFDLEFSYITSFKDVMKMEEELLTAGLQAVKDSYGDQIKELFGLEVIVPTTPFPVVKLADLYKALEEEFGYTVDESEKGDLTTEAERLSYDWVKKHYGHEFLFITDYSAEKRAFYHMRDENGVPQGYDLIWRGVEITTGAQREHRYEVLKKQAEEKGLAEDVKFYLEFFQYGCPPHGGFGLGIDRLTMLLCGLSIKDAEFLFRGPNRLTPMEKQEQNSICREIGARTGGDIYIGVVGPVRSGKSTFIKRFMEQLVLPAMSGSAAARERARDELPQSAAGRTIMTTEPKFIPETAVPLQLEGGGACRVRLIDCVGYMVEGAMGHEEDAKPRMVKSPWFEQEVPFDLAAETGTRKVICEHSTIGVVVTTDGSVSDIPRAGYAEAERRVVTELEALGKPYIILLNSTHPDAPETRQLAEGMARDYRRTVLPVSCVDLDASMLGEILRRVLYEFPVQELDFALPRWVTMLEPGHWLQAQVYTAAMQLAERVSRMKDLPAGTDAPALECDAVQRSAVAGADLAAGSVRVSLELKPEIFYQVLSEQTGLDIGDEAGLMPCIMELARAKRAYEKVRSALEQVEATGYGIVMPSIDELHLEPPEIVHQDGRCGVRLQACAPSIQMMKATIHTELSPIVGTEKQSEDLVQSLLADFADDPVQLWESNIFGKSLHELVNDGLQNKLLHIPQEARTRLQETLERVINEGCTGLICILIMSANDAFTAGVRPGGLTSSTEIRLLLCYLVKNAGPITRQEIENALMEEALVNYFEIGSCLDDITKQALVTLTGDSYTITDKGRKVAQELAYDLPRSVRERAVAAVLRCQTWARKEAKYSARITEKADGHCTVRCTVKGLDSELFCLELGAPDRLSAELVKKQFILKGNEIYQLLINKLTEEEKMQAYRTENNYRSAARLSPAELRAAMASGEILQATALAFDTRRQLRFELGGVKAVMPFAQCADGAETGTVRDIAVLTRVGRPTCFVIEGLDTDEDGAPCYRLSRAEAQRLCKAEYLDTLSPGDILPCTVTHIEPFGAFCDVGCGISALLPIDCMSVSRISSPADRVSVGQQILCAIKNRDAQGRFVLTIRELLGTWAENAARFTVGETVVGIVRSVEEYGTFVEIAPNLAGLAESCSGLAPGQAVSVYIKNILPEKMKIKLVIVNHALSQPHRFELRYFITEGHLDRWVYSTPECPKRIETDFAVAACNPGMHFVRLCIILYLYAQHPLSGRRHTLALPGICAAEKKGEVGMDIAVGDTILTRKKHPCGASSFEVLRVGMDFKIRCTGCGREVMLPRAKIEKNIKKVVKPGSAQMQDISSRMDAVCRRFEELSMRLNQPDAAADPALFRKLMREYHDTEPVVEAYRDWQTALDHLAQAKALLEEPGSLDPDFKQMIQQEISEKSQDVAKLENNLKILLLPKDVNDGKNVIMEIRSGAGGEEAALFAHSLLRMYTMYAQNRGWTLELLNLNETELGGVKEAIISVDGAGAYNRLKYESGVHRVQRVPETETQGRIHTSTATVAVMPQAEEVDFALDMKDLRIDTFRSSGAGGQHINKTSSAIRVTHIPTGTVVECQNERSQFQNKDKALEILRSRLLAQKQKEQQDAINAQRQGQVGTGDRSEKIRTYNFPQDRCTDHRIGLTVHNLEKIMDGNLDEVIDALATHEQTEKLQRLGGMEIKTRVLPADEAGVAEAAQLLRQGQLVALPTETVYGIAADARNGAAVRDIFVAKGRPQDNPLIVHVTGPEMLPGLVSEVPERAQLLMAAFCPGPLTIIMPRGPEVADECCAGLDTVGIRMPSHPVARAVIQQSGCAFAAPSANLSGKPSPTNAQDVFTDMDGRLPLILDGGECDVGVESTVVSVVGDKPTLFRPGHITLEDLERALGEEVEVSKAILEKLPEGAVVRSPGMKYKHYAPKADVTLLNGTFAQFKAYVDAHKDENPSCLCFTGESAKLDVPCVEYGREGDGADQAKHIFRSLRALDEQGDGVVYARCPQKDGLSMAVYNRLIRAAAFRVIDLMITLGITGRSGCGKSTVTAVFAAHGVPLADADQLSREILLPGSPLLPQLAARFGGEILRPDGTLDRRLLADRAFATPEGKAALDSLTHPAIVARIRAAKQAAQTAGASLFVLDGAVIVGTAAQAECDRLCVVTAPFETSVARIVARDGISPEMAARRLNAQTPERTLTAQADYTLHNDAGLEALQAAAARLCERLQAEGGVTAALMNEQNYEKAYDPIAARERRAAREKQRLRKQQRRRRMVRRLVTLCLAVVLTVCVVPPLCNRAEQLLYPRKYEQLVEKWAAAYELDPLLVYAFIRTESGFDPQATSSVDARGLMQMTEETFLWMRSKIAPEEPLTFADLYSPDTAIRFGCYYLHLCMVRYKGDVSTAAAAYHSGWGTVDQLLQIEEHSADGETLQGFPYNQMHHYVNKITACYQTYQRLYAGQMSEKLTAKEYAEKLLYTPEYAADKQADVKEKAAAFAEGYKKFMDSAKTEREAAVVSEQMLLAAGYKAFEPQKAYAPGEKVYFIQENKAVVAATIGQKPYEEGFRLVIAHIDCPRLDLRPNPLYESDHMSYFRTHYYGGIRKYQWATIPLAIHGVFTRADGSSVNFAIGEDENDPVFCITDLLPHLGAEQNERKLSEGIKGEELNVLIGSDTVEEEDVKEAVKLNTLILLNQKYGITERDFTRAEIEVVPAAKARDVGFDRSMIGAYGHDDRVDAYPALLAEIETKDPVRTTICVLTDKEEIGSDGVTGMQSMYVFHFMQLLCRAAGQDDILAFRNSVCLSADVTAAYDPSWASAFEKQNGTYAGRGIAIFKYTGSRGKSSASDANAELLGDITRMLDANNVAWQIGEMGRLDLGGGGTIAKYVANRGIKVLDLGVPVLSMHSPFEVIHKTDLYMAYRAFSVFCQSADMNIKQASEQSGVSAPNIRFYEKEGLLTPARRQGNDYRDYTAGDVRTLKLIRMLRMLDVPLPTIKAVLRGEQPLQQTLQAQQTVLEQQAAQLAAAMQFCADLARQAPQTDTLDVDACLTRMESPAPQQGFFSGWLQDYCTLAQVQHQKHFFFIPQGSINTPQEFTAALQAYAEEKGMQFTLTKEGMYPEFLLDGIAYKAYRNPGKYRDEICCDAVHPEQLDAGLPLRREKLLRFLRLAVPPVCTFAAILAAGWVVTGGAGWLWLAVLASAGVLLGRCFEKWLMKQFVQRAGGRIGLWGGLLAAALAAFAAGWLVPARAPVGCKLNELTAAPDFSPFSPAAPAVATSDAGTPAAPSLPEKWVCLTFDDGPSKTTPEVLAALDAAGVHGTFFVVATGYNEKYLPLLTQAAAAGHQIALHSASHEYSDIYRSSAAYWKDIALLKQRIAPYVDAESIRYLRFPGGSTNTVSRRYGGKGLMPQLKTEVEQRGWQWVDWNVCAEDAVGGHPSADTIYRNVVRETGEQTHCVVLMHDSATTRTTAEALPDIIRWYADNGYTFLTVAEALPLGMKHKKTYEKQRNHLTNGRKYVTISKQSAPTVFYLKNRRTVMKNKRKNILLIAGMLLALLVGILAYSAYTQKQIYQESTANLLSTYGQSAKTFTMFAQRNWNILNDWDSYLGTLAELGEQEGQWQEYIAQKATWQYTDFYLFNEQCEFWTTAGRQGTAEYMKATFEKLYTENKPVISSYISSQGIRKILFAIPMEQPLQLDGTTYTALVVSYDNAVLEKLLGSMVYEGQSDCYIVRSNGDVVLSTETKTEITEQMTNLFDYLQQNASVDQPYFDTMVQTLPQGGEGCVLYTLNRQKYYLIYQPLGLMDWSIIGIVPTGVVDAGMRRVQVATILVIALLGLLIMAGVIKIQRDAERNRRRELERRREKSDMMFAGMARVVERFAVCDLDRDRYQYHERRGEPLYQPEGSYQQMLEQISRKYVVLTDSENAKIPQMLAPENLRRLIKTDNDSLKLEYAARDKSAFFMMTVVPMAWKENRLTRVMMIVQDMGKQHLLQSLANTDGLTGLLNKRYFDRVLTVLEQHSQPFALFYMDLDRFKPVNDTYGHDVGDELLKGVSQRLQGCIRSRDYAFRLGGDEFALLLLGSMKPEACASKMNMICEMVAVPYEIDGNTVSVGASCGYALYPAESVDVQQVRCIADQRMYENKQANHARQDGAEGIMAKFIFVTGGVVSGLGKGITAASLGRLLKCRGLKVASQKLDPYVNVDPGTMSPLQHGEVFVTDDGTETDLDLGHYERFIDENLNKYSNLTTGKVYWNVLNKERQGAYLGQTVQIIPHITNEIKSYIYNLASSTEADVVITEIGGTTGDIESQPFLEAIRQVGLEQGRENCCYIHVVLVPYISGSDEYKSKPAQHSVKELQGMGVSPDIIILRADGSVGSDIRRKISTFCNVKPECVIENLTMPSLYQCPLMLHTNGLDDVVVQQLHLDVPPADLTEWKQVVSRIATRSKTCTIALVGKYVKLHDAYLSVMESLYHAGFENDSQVEIRWVESEDLTDQAACKEAFADVDGIIVPGGFGDRGIEGMIQAAQYARENRVPCFGICLGMQIMVIEFARNVLGYKDANSSEFTPDGAHNVISLMPDQQGNIPKGGTMRLGKYPCTVAPGTKMAECYGESEIWERHRHRYEFNNDFRQEMQDAGLVISGTSPDGHLVETVELPGRDFHLGAQFHPEFKSRPNRAHPLFKGFIAAALRYRAAAQRDMLHLMGRALIVSAGANSNEYIAARLSEMGYSRPVIIPSGAEARRRMSESDFELIVVNAPLPDEFGHELCITAVEQTDAGVVFLVKAAQAEQLLAPLNEQGVLLLSKPFTTPLFLQAMHMAAAGNHRLQRLRQENARLQDKIGQLRLVSRAKCCLVEHAHMTEAEAHRYLEKQAMDTRRDRAEVAQEVLEEYADRSEMSYSTQQDILDFVEDNNVKFVRFAFCDIFGTQKNIAVLASNLSKALEEGVCFDGSSIAGFMHVEESDLVLRPDLSTVTILPWRPTEGRVMQFFCDVEKPDGAAFSGNCRGFLRDVNRKFKKLGLTCNVGTECEFYLFEKDDRGHPTCIPIDFGGYFDVAPLDAGENLRRDICLTMEQMGMAPQHSHHESGNGQNEIDCRYAGPLKTADNVMTFKQIVRAIAMRNGLHASFLPKPLPQQAGSGLHINLSLYMDGKNLFEGDIAPDSIAGSFMAGVLAHSRELTAFTNPLPNSYQRFGCDEAPRYVSWSRQNRSQLVRIPMVKGDNCRMELRSPDPACNPYLAIGLILAAGLDGIEQRMVLQPPVNRNLFDSAEAKGLGLETLPATLEEAVQVAEESEFLRRVLPEGLSKRYFSEELKRCAALRSAPDRAEHERVYYFNAIMAANVMEIYGSKVFNEHVMKERLPSATYKSLKNTLHKGAPLDIEVANVVASVMKRWAMELGATHYTHWFQPLTGITSEKHDGFVSPVGDGTAIMEFSGKELVRGEPDASSFPSGGLRATCEARGYTAWDPTSYAFVKDDVLCIPTAFVSYTGEALDKKTPLLRSMNALSGQAVRILKLFGKDVDYVSTTVGPEQEYFLVKKEDYEARQDLILTGRTLFGAPSAKGQELEEHYFGVIRPEVSAFMKELDEELWKLGVPAKTKHNEVAPCQHELAPIFDTTNVAIDHNLLTMEMMRKIAPKYGLVCLQHEKPFEGVNGSGKHNNWSMSTTHENLLDPGDTPMENLQFLIFLAAVIKAVDEYADLLRTSVATPGNDHRLGANEAPPAIISIFVGEELEAVIDAIASDSPYAGPVKMKMDLGVDVLPKFSKDTTDRNRTSPFAFTGNKFEFRMPGSAENLSDCNTILNTAVAKELKGYADELEGAEDFTSAAIALVKRTIRDHRRVIFNGNGYTAEWEAEAAKRGLPNKKNTPAALPALVEPKNIQLMEEFGVLTKVEMESRYEVEMEHYSKIINIEALTMLEMARKQLLPAINAYMSEVANTAASKLAVSEHISVRSETKTLEKLSSDADTMSDAIDTLQDAVNAAKALPTESEKAVAFHDNVLPVMDALRAAADDAETICGEDYWPLPSYSKMLYYVMKSERTYPVYKVNKHAEGLLVGGHPWVYENDILEAPGTAPENGTLVDVVSPKGAYLGTGFLSLKSKIRVRLVSRNANDTFDTAFWRRRVEYAWAYRKTVLEPADLSACRFIFGEADQFPGLTVDRFNNVLVTQTLSVGMERLKPVLFPLLAEVLRADGQTIDGIYERNDEALRAKEGLEQNKGWFALPGESHPESTQTEICENGVYYHVDFENGQKTGFFLDQKYNRRTVARLAAGHTVLDCFTHTGSFALNAAKGGAARVTAADISAEAIAMAKRNAERNGLDNMDFLCEDTFALLPRLEKEGSPYDFIILDPPAFTKARRTVENAMRGYKEINYRAMKLLPRGGYLATASCSHFATEELFIKMLRAAAKDAHRQLRQIEVKQQAPDHPILWGVPETNYLKFFLFQVIMEIERKWMVTGWPEGLPLEEEFTMRQGYISVQPTVRIREEALTGGSTDYILCFKSAGGLAREEIERSIDKDLFVQLEEKIIGKPLIKKVRRSYRLPDGAVLEVNHVDEGLPTAFWYAEVEYPTVEAALSWQPEACGLAAYLNDEVTNQPGQSMGAYWVQTRGMLVLLADGWTNGWSTMNLFCVYRSSWRDPLGYIRLFGHVLGHANWEHFLNNMLLLLVVGPPMEEKYGSIPLLKGILFTALVTGVLQCILFPNTGLLGASGIVFMLIMLSSLAGFSGGIPVTMLLVAALYFGQQVYDIIFVHDNVANFMHIVGGLCGTAFGYYCALHRRPARSRRMGKAILAMIVTVIVGYISGAIFANWVNAPEWGVILAVAVMGAFIIYFNDKKQMTPQHHLPADIERTSLSIITAELDAMGLTPPPETAAVVKRVIHTTADFDYARNLRFTPGAVAAGVAALQAAAPIVTDTNMALSGITKPGLARLSSTALCYMADPEVAALAKANGTTRAVASMQRAAAEHPGAILAVGNAPTALLTIADLIETAGLRPALVIGVPVGFVNVVESKERLFEVCTAHGVPAIVAMGRKGGSNVAAAICNALVYSAAGMLDPTDRGWKMSRAKCIMVQGTMSGAGKSLLCTALCRIFAQDGYRVAPFKSQNMALNSFVTRDGLEMGRAQVVQAQAAGMEPDVRMNPILLKPSSDVGSQVIVNGEVRGQMPAAAYFKLKKSLIPEILAAYDSLAEEVDIIVIEGAGSPAEINLKADDIVNMGLAKLVDAPVLLAGDIDRGGVFAQLYGTVELLEPAERARIKGLVINKFRGDAAILKPGLTMLEEKTHLPVLGVVPYLRVDIEDEDSLSSRLESNTAVKPLDAAILRLPHISNFTDFMPLEQHPLLSVRYVQSPRQLGAPDVVILPGTKNTIDDLLWLRQCGLEAAVQKLATSGTPVLGVCGGYQMLGETLADPEGTESGRSQTVRGLGLLPIQTVFTDAKHRTQDTATVTAPQLAGAVLTGYQIHTGRTAVQGVPFCRLADGSAEGCVKDNVAGTYLHGLFDTGELTEKLVQLLCSRKDISPASAPLLSMAEYRQQQFDLLADGVRRALDMNALYAAMGLEGRNTVMMQLVHGGDWAGYQAQYGQDALDFSANVSPLGLPEGVAKAITAALATADRYPDPLCRALRAKLAVHETVPAAHILCGNGAADLIFRLVWAAKPRTALLPAPTFAEYGAALETAGCTVRRHFLRESEDFAVTEAFISAVDEDTNMVFLCQPNNPTGQLTPLALVDAVLHRCEACGALLVVDECFLDFLPESEALSAKKLLASPNLIILKAFTKLYGMAGVRLGYCLCSNIALLDKMQSAGQPWAVSSLAQAAGLAALDETAYVARVQALIAQQRPILRDGLRALGLRVLDGSANYLLFQAPETLGDALRQRGIVLRGCGNYPGLDGSWYRTAVRTAPENQQLLKTLQEVLAMIGYAVLGGFVLDAIFGDPAWLPHPVVYMGKAISALEKGLRARLPKTPEGELWGGRILAFCLPVGTFAITSLVCMGAAALHPLLGLAVQMFWCGQALAAKGLVQESTNVYRELTKPDLPAARIAVSRIVGRDTQALTAEGVTKAAVETVAENASDGVIAPLLYMLLGGAPLALTYKAINTMDSMVGYKNTQYLYFGRAAAKLDDIANFLPSRIAALLWVAAAALTGNDARSAWHIWRRDRRNHASPNSAQTESACAGALNVQLAGPAYYFGQYYPKPTIGDAVRPIEPEDIRRANRMMYAESLLALALGLVIRGILMLIYLLRHGLTEYNAEKRYQGQRDIPLSAAGRAMLCRADISPKTVYITPLCRTRQTAEVLFPGARLVETDGLKEMCFGSFEGRNYIEMEHDPDYLAWVAANCESPCPDGETKAAFCDRICAAFSALVDKALASGEEMLVILAHGGTQMAAMERYALPHKDYYEWCAPNAGGFVLDAKDWASKRVLYLVKTVQYTKEAQAMIFITGPLYSGKRTFARTLPGRCITDAQQLAAGCKDNAELEKLADKLSAYDIVLSTEVGGGVVPIDPAERAARENAGRLACMLAARAACVVQMFCGIPTVLKGELPECMIVLQTIAVAFAMFSAVPVPQFAWNEKNMRYALCAFPLVGLLCGALWCVCGVLPLPAPARAAGFCLVPVWVTGGIHLDGYADTCDALASYGDREKKLEILKDPHCGAFAVIRLCSYFAAYLCLAACVQFTPRVGALWTLALVLERALSGLAVAAFPMAKNTGLAHTFASTADRTAVRNVLAVLAILLCGALLALGGGALAAVAILLFLWYHHVAVQQLGGITGDLAGWFLQKTELWMLAALCACQWGGLLMLTLVLGGAASGKSEYAEALVLRSALPRYYLATMQVWDAECAARVEKHRKMRAAKQFETLECPLHLETVHLPRRGTALLEDLGNLTANELYDPAGAGDAAAEHILQGLESLAAQCENLIVVSNEVFSGGADYAGDTDRYLLALARVNNALAARADAVVRVVCGIPVYYKGVEKMTEAELMQLLAAITPPDETARAAAHTHWASLAKPLGGLGALETLLEDAAALTGTAQFDFSRRAVAVLCADNGVVAQGISQTDQSVTRAVAENLAARRTSVCRMAQAAHCDVLPVDLGIAGAPVPGVRDCRIAAGTADFTKGPAMTRAEAVEAIGRGIALTRQLAAEGYGLVATGEMGIGNTTTSSAVAAVLLAQPVQTMTGRGAGLSDAGLARKVEAIRRGIACNAPDPDDVLDVLSKLGGFDIAGLCGMFLGGALAGVPVLMDGFISGVAALCAVRLCPAAAKAVFASHCSTEPAARLVLDALGKTPLLTAGLHLGEGTGAVASIPLWDMALAVYEGCYSFAEGGIAPYTPQCMIQFLIAAPRSGSGKTTVTCAVLTALQRRGTDPCAFKCGPDYIDPMFHRSALGVESHNLDLYLSAPDTVRTLYARYAAGHGAAVCEGAMGFYDGQGLTTRASAWELADTLALPVLLVVQPKGVSITLAAELQGLLQFRTPSHIVGILLNDCSESLYKTLRPMLETETGLPVVGYLPHLPGCVIESRHLGLKTAGEIVDLQQKLLQLADALVLDWAQLAVLTDRPAPAAPPLAAPCTPSVRIAVARDEAFCFAYAETLDALRDAGAELAFFSPLRDAALPENIGGLYLPGGYPELYARQLSENIALRAAIRDAGQEGLPTAAECGGFLYLGQTLEGTDSKVYPMAGVLPGSGHNTGRLVRFGYAVMTAKAGSMLFHAGETLPVHEFHHWDSSENGADFSVCKAKKRQWECGFASAHLYAGFPHLYWAGTALPRRFVQAAQHFLKHKGMISLIGMGSGCPESLTAQGLAALQSAGLILGAKRLLEHLPAGCTDNCKAVYKPEEILACLAAQPDTDTAVLYSGDTGFYSGAAKLLPLLRAMGYSVRVLPGLSSVQLLAAAVGRPWQDWMLVSAHGRACDPVAEVLAHPQVFFLTGGGDTPATLCAKLTAAGLGAAHALVGENLGTPAEAIRFGLARELAEQSFAPLSVLLIEREALPSRRTPGLPDDAFIRGAVPMTKQEVRAAALAKLAVTPTDTLWDVGAGTGSVSVELALAAPAGQVYAVECDPEACALIQQNREKFSAYNLTLIEGKAPEALDMLPAPDAVFIGGTKGNMDAVIDAVLHKNSVARLCVAAIALETLSAAVAALTAHGLSAEVTQIAVSRTKTAGSLHLLMANNPVFLITGARTMKAVVFSGTTEGRVFSRQLAALGAEVLVSVATPLGAEEQGKADGITVHCGRLTPEEMAALLQGAALCVDATHPYAVDATKNIRAACAVVGVEYHRLLREESPLPAGSMVFATAAHAAAFLAGCSGNVLLATGAKELAAFAALGPERLFPRVLPTREGIAACEAAGIPHRNIIAMQGPFSYALNCALIEQFSIRYLVTKDGGAVGGFAEKAQAAQDTGAQLIVVRRPAENGQTAAQILARCKEVLVMLDVMEIDIDRPEKVVYVVGLGPGEPFYMTQQAANTLESVDAICGYKVYLDLIRDEFPCEEYYSTGMTQEIDRCRWALEKAHTGKRVALVCSGDAGVYGMASPLLELAPDYPDVAVKIVPGLTAALSGGAVLGAPLAHDFCVISLSDRLTPWEVIEKRLACAAMGDFCVALYNPSSKGRPDYLAKAVCILLENGKSADTVCGIVRNIGREGQTARILTLAQLKDTAVDMFTTVYIGNAATKQLGGRMVTPRGYRRMTRAYLAFTDTGLALAKRLAAALPGSVARCGQNGVSLAEWTSARFVHSDALIFVGAAGIAVRAIAPHCKSKTADPAVVVVDECGRFAVPILSGHLGGANDLARAIAAVCGAVPVITTATDAHGIFAVDEWAKHQNCMVLEPERIKLVSGKLLAGQPVYYRADFPVTGTVPVGLFPADTPEKADFALTLCPTGQALHLVPRIGVLGIGCKRGTSAETLEAAFAAFCTRHSLAAQAVTAAASIDLKQNEPGLLAFCLAHSWPARFYSAAQLRNVPGQFTPSPFVQRVTGVDNVCERAAVLDADGSLFYPKFACNGVTFALACRPFAPDWRWQNAMVHFVGAGPGAPDLITQRGAAFLQAADCIIYAGSLVNPALLGLAKPDCAIYNSAEMTLEQVLDVMRRMEAAGKSTVRLHTGDPCLYGAIREQMDALDADGVCYDDTPGVSSFCGAAAALNAEYTLPTVSQTVIITRMEGRTPVPEKEKLASLAAHGATMVIFLSIGLIDKVQAALLQGAYTPDTPAAVVFKASWPEEKIVRCTVGSLAESTRAAGITKTALIVVGDFLGTQYERSKLYDPAFTTEFRKGEPVMKYSVETNALAIGYGKAALARDIALGAAKGQVLALIGPNGAGKSTLLKTLAGQLAPLGGAVLLDGQELARIPGNARAQKLALMLPHTRRTELTTCFEFAAAGRIPYTGRLGILSAEDKKQVQSALELVGAAHLADRDFNCVSDGQRQRILLARAVCQQPQVLLLDEPTSFLDIKGKIELLTILQKLAHEQQLAVIVTLHELDMAQKIADAVVCVSPHGVSAPMSPAQAFARENIKALYGLTEVQYSAVFDPPKPVKPQFEHYVRSGQKLLRCGYTTGTCAALAAAGAARLLLTGTAPETVALRTPKGIVVEVAPLFCRTVAEGAECAIEKDGGDDVDVTTGLPVTATVTLLPGTPEVCITGGAGVGKVTKPGLDQPVGQAAINHVPRQMITEALRREAEAACYPGGFAVIISIPGGEEVARRTFNPHIGVEGGLSVLGTSGIVEPMSQQAILDTIQLEMNQATLRANDHRRLILAPGNYGLDYLHETYPQFADIPVVKTSNFIGDTLDMAAAAHFEQVLLVGHIGKLCKLAGGIMNTHSHTADCRTELFCTHAALCGADRKVCTALYNAATTDACLEILDTAGLRELVLQSLLAAIQLHLDRRAGGAFRVGAVLFSNQHGPLGQTETAARLLDEWKEMTSRKRLVFSYCCLALLLAVLFAVSLFWGSVALTPQAVLAALTGRGQDALSVGIITQLRLPRAVMAALLGAALSAAGYLLQTFFANPIAGPFVMGISSGAKLAVALVMVLFLNYGLLTSSAVLILAAFAGAMAAMAFVLAAARRVQRMSILVICGVMIGYICSAITEFVVAFAQDSSIVNLHNWSQGSFSGMTWGNVRTAALVVLPALAAAFCLAKPMAAYQMGEAYARSVGVDVRRFSRLLVLLSSLLAACVTAFAGPISFVGIAVPHLVKQLLGSARPLYVLPGCCLGGAAFCLLCDLIARSLFAPMELSISAVTAVFGAPVVIGLLLRRNREDVRMKLTRAQFLKALPAAALVLAGCTAAPTAPADTDELVFDHAYPLDYATQFTADCYADGSTLLTIPDAQAKFLVRPEGAATLHTVPEGVTVLQQPVQNIYLVSTSAMDLFLHLDALDSIALSGTRAEGWYLDEAKQAMQAGRIAYAGKYSAPDYERILTAECGLAVENTMIYHTPEVKEQMERFGIPVLVERSSYESSPLARMEWIKLYGILLGKEALAEEVFAQQAQRIAPLLEQPSTGKRCAFFSITSSGLATVRKSGDYVAQMIGMAGGEYVFTALTDSGNSLSTMNIPLEDLYAGVRDADVLIYNGTIEGTISTKEELLARCALLAECKAVQSGDIWCTTPSFFQQSMALADFMLDLHAVFTGETADPDTLHFLTKITMRCKQFIIVSLAGVVLAASLAGCGGAVPASSAAASSEAASSVVVSSAAAETALPDGIYTADFETDSSMFHPNEACNGKGTLTVENGVMTFHVSLASKKIVNLYPGLAADAEANKTAWLIPTVDTVTYADGTTEEVYGYDIPVEALDTDFQLALLGTKGKWYDHTVSVRNAEPKTEQASETPADGAYTAAVVLEGGSGRATVESPAALTVAEGKMTATIVWSSPNYDYMIVDGEKYLPTNTEGNSTFEIPVAALGTPLTVTADTVAMSKPHEIEYTLTFTLEMKKRNIRKTAAALTALALCAGVLTGCGGAASSTASSVAASSAASSEASSADADALAAQNVADLIDAIYVQQRTDDTDAQCEAAKAAWDALTDAQKELVEGENADPDYFGRDTGDASKDDARNADDIGENELLVVSFGTSFNDSRAADIKGIEDALQAAYPDWSVRRAFTAQIIINHVQARDGEKIDNMQQALDRAVANGVKNLIVQPTHLMHGAEYDEMNEMLDQYRDKFESVAVAEPLLGEVGADASVINADKEAVAKAVTAAAVKEAGYDSAAAAAADKTAFVFMGHGTSHTAKVSYSQMQTTMQTLGYDNVFIGTVEGEPEDTSCEAVIEAVKAAGYTKVILRPLMVVAGDHANNDMAGEDADSWLSQFTAAGCFENVDCQISGLGRIADIQQLYIAHTKAAMDLLNGMWVKYGTEQKGTGKRIGKKRGLLLAKWQSKKTPFPTGFLVQPIPRDLGRQSPGTNSGQVSMLKIEHLTKTYGGKPAVQDLCLHIRPGELCAFIGHNGAGKTTTLKCCCGIQQFDAGEIYVDGISVRENPLECKRRLAYLPDDPQLYEYMTGIQYLDFIADIFGVSAAQRTQRIRQYGDAFGLTQDLAQSIGAYSHGMKQKLAIIAALLHEPKLILMDEPFVGLDPLASHQLKTQMKAFCAQGGAIFFSTHVLEVAEKLCDRVAILRKGQLVREGAMEQVRGDDTLEEVFLELEDTGEALMIRALLKKQLLELGAAFVRSSKTGKRRSRAGAFGYALLFAVLMLLVMLSFGSMALPLAVTLVPQGLDWLYFVLMELSALTVSVLASAFTSYGHLFRCRDNQQLLALPIPPGAIFAVRCGGVYLTGLIYLLLAWVPSVVCYALAAPRPGGALLAALPVALALAGVSMVLAVLLGWAVALLNRRAQHKSLVTVVGTLLFLAVYYAAFCWVSNAVEALAVDAVQAGATAGRVAAPLRLLGLAAVGNVPALLLFLALAAACMALCGKALAKPYLRLLTLEPGRAKAEYRAKTQKKQPPRRALLRRELLHLGACPMWLLNCALSSLLLPVLGVAALWKAADLRAFTAAYLPESLPMLVCGMVCAIAAMNFITAPSVSLEGGTLWLLQSLPVPPQQVLRAKAELQLLLTLPGAWFCAGCAMAALRIPAGQGLLVMVVLAAFVWLTAQFGLALGLCLPNLHWVSEAAVVKRSAASMLAMFGGWLLAGGVLFLPLILLDYAVPPLAAQTVCLAVLLGLDLLLHRWLCTRGAARFAALHMHCTLEVCVDSTASALAAKRGGADRLELCADLIIGGTTPSPALLRQVKAETGLPVRALIRPRFGDFCYDHYELAQMAECAAELVAAGADGIVTGVLTPAGALDTDALRPIYAAARQAAEKAHRTVDCTLHRAFDVCCDPFAALEAAKQLGLTTILTSGQAASAPQGAALLRQLVEAAGQEVEILVGAGVSAANIPALAAQTGARAFHLSGKQVLDSRMTFRREGVPMGLPGFSEFEIWQTSEANIRAARTVLDALMAQQPFLEHSIKQKYFSFALPPVKKSMGKSADFPIDKLKYSFRMISTTIQQLVNYGLDTGLILPDDEIYIRNQLLMTMQLDDFTAPEGEVCYTDLESILKTLVDDAVARGVCEDNSTARDLFDTKLMGVLTPRPSIVRANFEERYENEGPQAATDWFYKFSQDTDYIRRYRIKRDLKWVTKTEYGDLDITINLSKPEKDPKAIAAAKLAPQSAYPKCQLCVENEGYAGRMNHPARENHRIIPLTINDSAWNLQYSPYVYYNEHCIVFNNQHTPMKIERATFRKLLDFVGLFPHYFVGSNADLPIVGGSILSHDHFQGGHYEFAMAKAPIEKPWVFPGFEDVEAGIVHWPMSCIRLTCADDARLVELADKLLAAWRSYTDESCFIFAETDGEPHNTITPIARMRDGKYQLDLVLRNNITTPEHPLGVYHPHAKLHHIKKENIGLIEVMGLAVLPSRLKQELFDLADVLVAHLPTAEYPEALQKHAEWAEEILAKHPELNADNVHLILQDEVGHVFAQVLADAGVYKLDEAGRAGFVRFLESVKMMKSISTWKQELTKGAHAARLAALYCCTPDETPAQAARYAAVLDGLETTFGAHTEAGLYSAPGRTEIGGNHTDHQHGRVLAGSVNIDMIAAAAPNSLNQLRVQSEGYDLCVIDLDDLTARKEEENTTASLLRGECEAFRQRGAKLSGLDVYISSNVPKGSGVSSSAAFEVLVGVILNDCFMDEKVSPIAIAQIGQWAENVYFGKPCGLMDQMASSVGNIITIDFADKANPDVEPVQVDFSKAGLALCILDSGADHADLTDEYAAIPNECRAVAAVCGGEVLRDVPFETFLANIPACRKQCGDRAVLRAFHFYADNDRVPQQVAALREGDFDAFLQMVTASGDSSWEYLQNVIPAGYKEHQEVAVTIAAAKHYLGGKGAVRVHGGGFAGTVQAFVPVEMLADFKANMEKILGAGRCHVLSIRPEGGAVLMEPRKHYFAKIPTIAIFIVMAMSGPLGVLLFILKGIDQKMQKEEQEAARDRGDYRADLGPEPDRKSEPVYGHDIPTAEQKSAKQWHKNIAVLCTIMGAVFLFAGVTDAVDIIGAWQILPDPGELFSDIVMAIGGGGALLTGLRMNRTRKLEQLLDKVVGERDNIPLPELFAAAGVDAARGRAAVKSAIEHGYFGADAYIDNRTDTLVVRGAAPQPKKPAQAPTPKAHPAAEDEYAALLRQLREVNDAIPDPVMSQKISRLEEVSGRIFALAQKDPDKKAQLQKFMNYYLPTALKLLNTYACLSGQAVEGTNITEAKHSIERSMDLLVTAFENQLDKLFQADALDVNADIAALEGMLNLDGLTGSEFTRMAKKEFQAESKKLMDMMINSIYTNKEIFLRELISNASDAIDKLYYKSLTDTSVGMNKGDFRILITRDKENRILTVEDNGIGMTKEELEQNLGTIAHSGSLDFKKDNKDENIDIIGQFGVGFYSAFMVADKLTVISKAYGSDEAWQWESSGVDGYEMTPAQKDTVGTQVILHIKPDTDTEKYDNFLDEYGIVAIVKKYSDYVRYPIQMEREKSRQKPEPDPKPEDYKPEWETYTELETLNSMIPIWKKQKSEVTDEEYNSFYKDKFGDYADPARVIVSRTEGTANYNALLFVPSHRPYDFYTKDYEKGLALYASGVLIMEKCADLLPDYFSFVKGIVDSQDLSLNISREMLQKDSQLKLIHNALEKKIKNELHAMLNNDRAKYEEFWKEFGRQIKFGAYSDYGMHAELLRDLLLFWSAKEQKMVTLQEYIDKMPAEQKYIYFAAGDSTDRLAKLPSAELVLDKCFDVLLLTEDVDEFCLQILHSYPRKDAEGKDGTVEFKNVNSGDLGLESEEEKKAAEDATAENKALFDAMKDALNGKVKEVKVSTRLKDHPVCLSADGPLSIEMEKVLSKQPGSEGVKSDKVLELNVNHPVFAALKAAQEAGDTEKLNKYSALLYAQAQLIEGLPVDDPAAYAEAVCSLMKMSKQGDAAYAWFLKGYNCSQSVVAAFAPQLGLTEEMALRLSAGFGAGIGRMREVCGAFCGVVTVLSMVYADPTDPKDKSRMYALVQQAAEQYRTRNGGGSIICRELLAKAGAAPAGGTAAEDRTADYYKKRPCPELCRICADLCAEFIAAHPEGRHGLYKEDAMQLEQLELTGGGTLTLYLRESVEAMPHFRQRPLVLVVPGGGYTHVSPRESDPVALQFAAAGYHTAVLHYAVGESARDALPMRQLAQAIGLVRQHAEQWNILPDKIALCGFSAGGHLALSGAVWEIPGMADQPRPNALLLAYPVVTAGEYAHRDSFVQLTGTQDVAAHQRFTLEDKITPVTPPVFVWHTMEDETVPVENTLLLLNALHKAGVPCEAHLFEKGCHGTSISTPEVDADSAHRNRWVKLAVEWLDDTFSFHAMVMDPTLPRIKVRDLLMQAFLTGWERSDKSTSQDEYLQSSIQVIEMLQVEPENLYAEEGLGLPDGEEVDHLDDLLRADGFWLYYGVEAENFFLIQWYPDEASANAKLAQLEELGDGKQYLVDLTLKRANPSEAENFGNSNPVQLRSMQLSVTERERLYAILEKYDQNPKVQQMREFIQHGDVTTYQHCKNVVLVSCWLNHRLHLGADETSLAVGAFLHDFYLYDWHKKGTFHGIRRLFEMHGFSHPGCACVNAEKVFHITKKEQSIISSHMWPLTFRHVPSCREAIIVCLADKYCAVVESMFKHSRVAAAKNANGEYDEWMDKIIIRPMTPEDWGAVSRIYVEGIATEYATFQTECPPYTAWDASHTKECRLVILSGGVLAGWCALHRVDPRWCYRGVAEVSIYVGEQFRGHGLGFQLLSALCAAAEKAGYWTLQSTVLQDNTASRALHAKCGFRLVGRRERIARDCRGHWLDTYLMERRAAADEPEGFKKLMRKTVWVLLCMVWLMLCAALPAFGAESAPHVTAETTMAQLRANPAIQGTGYYTYCREMTPLMVERWKNKTLHDYFGDTDRESGIAALNLIIDNYNKGVKVTYQVYTPEEIEHNSSLGCVQLFYYPAETPNAKTAIVVPGNALTATSEMGEGGSTAYELHNRGYAVFVLRYRTFLDLGNNAPLEDLARAVQLVTSLDKELSIHTQGYALVGYSSGGQLVGVFANKERGYGYYGAAKPGALLLAYPVVNFSEVKIAYQALMDTGNYGWHYYCSSVADLVTDDYPPVFFWYGKDDKVLPWMINQVQGPALQAALEAHKVPYVMKVFESAPHSIGVGYTTDAEGWLTDAVAFWEQQTAAMDQNTCFAYLNMELPDDIRRLKEAGYYDAAIARIDACLAEDWTASQNQPLHPQGALPVNPTPHGVDAWRQGLLAHREILRRLPRDYTLTADQLLNRLQATLRDFTAEEFAALDAAGQMDWRFVEGQKRYIYRAAETLVATHPDLAARQLDPPVPERSWDRFEPQHDQMVRTGAVSADITLRTSIGMTDETFARALAAAKAEGRDTVHVKVWLPLPAACPAQSNITLDSFTVQPTYIAPETAPQRTAYWETDLAENCRFGAQYSYRSTAHYAAPLELHADPVQPDFDTAEQLPHIAFTPYMKALAAQLTEGITDPVQKAKRIYDFVTLNVHYHFQPMYFVHENITDNCARSRRGDCGVMAATFITLCRIAGIPAKWQSGMVARPETAGCHDWAMFYIAPKGWMYADCSAGASMARAGNEKMRLHYFGNLDTDRMVANSDICAPFDPPMCSFRADPCDNQVGEMEVDGVGLYGQQVETTHEIVKHQEVMGFLAGLYTLLLVAICLLQALLLYRTGKPAARQDDEALKEWLRQQLEAQARVLEEKQAQQAQQNLAAMAHISDTLQTAVQGMSSTLTAGQNTQQQTMEQRLQGLEVSNARKLEEMRKALADGLAAMQAQNAQKLDEIRHTVDEQLQDALQKRVTESFKAVNDQLEQVYKGLGEMQSLAADVGGLKQVLSGVKTRGILGEIQLGAILEEILAPEQYDTNVATIPGSTQRVEYAIRMPGVDGNSVWLPIDSKFPGDTYAHLQDAQASGDAQAVENARHALELVLRSEAKDIREKYVEPPYTTAFGILFLPFEGLYAEVVNAGLLEVLQRDYQVNVAGPSTMAALLNSLQMGFKTLAIQKRSGEVWQLLGAVKTEFDKFGQGLSKMQQRLRQTDEELDNLIGVRSRAISRKLRAVQTLDENTAATLLELDTEPGRPVTARLPESGEELMSMKKISEAILGVGVDDTTIDLFESQYPVPTGVSYNSYVILDEKTTILDTVDARATEPWLENLAEALGGRKPAYLVVSHMEPDHGANVAKLAALYPEMQVVGNAKTFQYMEQFFGADAIAPERRVVVKDGESLSLGTHTLTFVFAPMVHWPEVMVSYESSEKVLFSADGFGRFGAVAKFDENADWASEARRYYLNIVGKYGPQVQALLKKAAALDIKTICPLHGPVLTGDLGKYLNYYDLWSSYKAEEPEKVLVASASIHGHTRAAAHTMAEKLRAKGAKVVEMDLTRTDVSYAVTEAFRCGKIVLACATYDGFLFPPMENLLTHLKTKNFQNRTVGLMENGTWAPMAAKLMRAELESMKNITLCENVVTIRSAANAAAEAQMDALAAELVAKMKRWLRFTAAVLAAAFLFALTGCGSSTNSASFTWFVDSIPANLDPQVASGASDVIACENLYGTLVRKDPDGELVPGLCEEWTVSPDGLTYTFTLKDGLRYAAAKGAATEYDITAEDFVFAFRRIFRADTASPYAVEFSAIQNSAAVLAGLADESSLGVSANGALSLVFRLSERDDNFLAKLAMPGAAPCDEAFFESTRGTYGLTDKTTLSSGSFYLYNWTANGLFLRRTVESPLVGSLRLVQDTSGSGKSAAQLIADDKCSAALDESGEATSLQTVSYSDTTWALLFNAAEGSVFQNQQLRQALAGIARENADVPSSGLYTAAKGLVPEGLTVDGLDYRETAGDPLPTISEPKALYLAARQGMATSDFSGVTLLLPKSAGLTELADQINSAWQKECSLFFSVEEVEQDEFDARIAAGKYTIALAPIRAEGGSVYQMLQQFTTAGGSLTGYADTVYADRLALSAQQTGKARCALLAQCEQQLLESCTVVPLMAQQKRLLLANGVRDLVFDPFFPVLDLTWAKMSMQKDQQKLAQLIQGKKVAFIGAGVSHKTLIKEFVELGAHVTLCDQKKSVEDFGDYAATIRELGIDLSLGENYLDGFKGQDIIMRTPGFVGYFEKPLQDAMAAGTMVTSEVELFFDFCPCEIVAVTGSDGKTTTTTLISKFYEAAGRKVHLGGNIGAALLPMLPEVSPEDVAVVELSSFQLISMHASPNIAVVTNVTPNHLDHHKDMQEYIDAKRNILLYQKQPCRAVLGYENEISRSMQADCKGKQVWFTRLHDTDNGAFLRKDGMLCMAEDGVVTPFLAQKDVKLRGLHNIENLLAAAAAVWGEVPVEAIRQVGSTFTGVEHRIEPVRTLDGVLYYNDSIGTSPTRTIAGLRSFDRKVILIAGGYDKHIPYEPLAPEIIAHVKNLVLMGATGPRIEQAVRECSGFDEAALPIQHADNMQHAVELARAAAKPGDIIILSPASASFDLYPNFEVRGREFKKIVNALKMIAQVKDAKRRTRFANACRGLPVLDTLLPLDCALFQKSQPWRFYAGPTLALELSGSTAWLAGHANPAELAGFLSFCGCESAILDGTVCPPPDGWHKAEALTVFGLPQAGPLPLPAVDEALWAQLSLCREAPAARVAAALYPADPARQADFYSELCTKRSRGRAVAWTLEQGSTVVCTVGAYALCNGQAYMACGQTAEPLRGKGIGGRLIVEMANSLAAEGLRPVFLCAPERVRFYTRLGFAKQAEYARYVPEKCMSILNHFFDYKPEVLALDEKAMELCQPYFRQMEEIRDFNQLKMLKAFADTQMSSTDMLGTTGYGLWDTGRAKLEQIFAQVMGAEDALVRSQFQSGTHTLAVALFGLLRAGDTLLAATGRPYDTLEGVIGLDGKGKGTGTLMDYGVNYDEAPLKADFTPDYDLIAKKAPGAKVCHIQRSRGYLQRNAFDLATIRKIADTARAANPEIIIFVDNCYGEFTQTQEPCQVGADIAVGSLIKNPGGGIAPTGGYIVGRKDLVELCAYRLNAPGLGKELGCTLETPRNMYLGFYYAPGVVCEAIKTAIYAQCMLELLGKKPIPRYCEAHNDIVTCFDAGTAEALIGFCQGIQAASPVDSYAAPEPSPEPGYTDEVVMASGSFTQGSTIELSCDGPLRAPYTCYLQGGLNFAASRAGVLLAVQKAYFKEMTIAILAHDSRKELALQFCTAYSAILSRNNVIATGTTGRMLAQTTGLPVHCYLSGKLGGVQQITSRVACDEVDLVLFFRDPLKADAASLTEQNLLRLCDMHSVPIATNIATAEVLLRGLDQGDLDYREGMHPAMIEPIPAMQARAVMFYRDGLYFKMNMKTEKFFTFPIKRAFLDSGMYPRIRRFSQCKSSTFMFLMTTQEILEAARGAKAALALADSASRAQALCSMAAQLCSPANMTAILAANADDMAAAKGHISEVMLDRLALTEERIRAMAKGIEEVAALPDPVGRVLKRVERPNGLVIEKTAVPMGVIAIIYESRPNVTSDAAALAIKSGNACILRCGKEAWRSANAIVQALRQGLRENSLPENAVCLIEDTTHASANALMTAVGYVDLLIPRGGAGLIRACVENAKVPCIQTGTGICHIFVDDTADQAKALDIIENAKASRPSVCNAEEVCLVHSAIAQEFLPKLAQRLGPDRVAAGKLPVELRLDARAAAIIPGTPAGPADFDTEFLDYILAVKVVDSVDEAIAHIAQHSTGHSEAILTQTQADADRFTAAVDSAAVYVNCSTRFTDGGEFGLGCEMGISTQKLHARGPMGLEELCSYKYVIHGDGQIRMRIVVKVGTSTLAYPTGRLNIRHAEELVKVLSDLKNEGHEVILVSSGAIGMGVGKLSLPARPKDTTTKQACAAVGQCELMYTYDRLFSAYDHTVAQILLTGVDVEHTERRVNIQNTLTRLLELGALPIINENDSVATDEITSIGDNDTLAAIVACCCKADLLVLLSDIDGLYTANPHTHPDAALIPLVEEITPEVMALADGAGSALGTGGMATKLRAARMVTGSGADMVIANGAHPELLYDIAAGKPIGTRFAGHKQPVLSTQEVMMKTIGFLGCGNMGGAIARAVCKATEPENVFLANRTAAKAEALAAELGCQTATNAEVAGNCDLIFLAVKPQMMEAMLEPLRFILAERTKRFVLCTMAAGLPVARIQEMAGGDYPVIRIMPNTPASVGEGMIQYCSANVTAEEEAAFCQLMAPAGRLDAVAEGMIDAASCVSGCGPAWVYQFIEALADGGVACGLPRAKAQEYAAQMVLGSAKLVLESGKHPGALKDAVCSPGGSTIQGVRVLEEHGLRGAVMDAVLAAYDKTKEMGKGMKFVCALPAAKVLFFNLPAKNKTKVLIFSQRLLRMNKKQNFMQCIPAEGGLLLMSQTTKRALEASFKKLLLEKPLNKITINDITEDCGVNRMTFYYHFKDIYDLVDWILAEDAAKAMEGRRGFGTWSEAYLDVLRQLQDNKTLVLNVYRSVGREQVEQYLYRLLDPILKDFADRECHDITVQDADKQFVVDFYKYALVGMTLEWTRRDMRGDPKKMVERVSTMIHGDFRRALCRLSSGSLKIEEMIPLEILILLDHILPLCAFLCHKQKIRRDGKPITAYPLIKFYMNTSLDNLTHKMQRAALGKIVDVALSRAEQDREKTMCQLVDAAKQFYGSGFSDETYENAKKVLTDPNSKWTKLINCVLDQTDPHVARTTALNLGYEAFFRGTKMIRENRVKYQCNIPWLILFDPTSACNMHCVGCWAGEYGHKNNLSFEDMDKIVTQGKELGVYLYMLTGGEPLVRKKDVLKLAEKHNDVQFAIYTNSTLIDEPFCEEVQRLGNIAFMLSIEGTPETNDARRGEGHYAAVMHAMDLLKKYGIIFGTSICYTRQNIEAVTNDAFMRLLCEKGAHFGFYFHYMPVGNEAAPELMPTPEQRKYMIDRIRYLRSSACDIPFYPMDFQNDGEFVGGCIAGGRNYFHINSAGDAEPCVFIHYSNANIHDQSILEILHSPLFMAYHNGQPFNKNHLRPCPMLENPELLEKMVHETGAHSTDLQSPESVEHLCEKCKAYAADWQPTADEIWSHHKIRESRYENYKDWKPSQPQDMKKSTSRIIGLLMLIIAVIFIMFALNHPEMSFPWNNTITWLLYGLYFLVTVVLLIAPKMKKMDKKPHIKPYLYGMLAGFGAIALSIIFFFLIYRFDGFGSAISTLTGILMPFIYGAVIAYLLKPVCNSIENFLRRFIPEKMNGLINALSVALTILFGLLLVYALVMMIVPQLITSVTTLYYTAQANITKFMNWANHLEFIEKNEQITELLNSAYAALNTNLDTWNTWLKNTLLPSMQNIVSGAAIGVLNVVTVAKNLIIGIIVAVYMLASRKRFVQQGKLVLHSIVRPRWAQLITEEVKYADKMFGGFINGKIMDSAIIGVLCYIGCLIFKFPSALLVSVIIGVTNVIPFFGPFIGAIPATLLILIQSPIKALWFVLFVLVLQQLDGNIIGPKILGNTTGLSSFWVLFAILLFGGLWGFVGMIVGVPLFAVIYDVIKKLVIHGLQRHQELTLLNSYHDQFGDPADDAAAQPAASQPAENQMDCKELYAQKLMTAAQAAALVKSGDWVDYGWAVNTPVAVDAELAKRLPELEGVNFRGGILMWVPEIFQIDDPAAHMTWNSWHMGGIERKAIAQGFSFYSPIRYSELPRYYRESSDPVDVAVFQVTPMDEHGYFNFGPSASHLGAVCEKAKKIIVEVNTNMPRCLGGMENSVHVSQVSGIVEGTNPPIGQMAAAGAATEVDLKVANLIVPQIPNGACLQLGIGGMPNAIGGLIAQSDLKDLGVHTEMYVDAFVDIAKAGKINGSRKQLDKGRQVYAFGAGTQKMYDYLNDNPECMSAPVDYTNDIRSISALDNFISINNAVDIDLFGQVNAESAGVKHISGAGGQLDFVLGAYLSKGGKSFICLSSTFFNKKTGQLESRIRPTLENGSIVTDTRANVHYLCTEYGCVNLKGLTSWEKAEALISVAHPDFREELIREAEKLHIWRRSNKIMIALSSLGCNLKLLRCVLSLNFKRIISHCSAVASHAISKAHRQNFIKSFSQLFCFLRTKQSPHKAKKTVCYAILVVFMATAVYPGSFDPVTKGHLDIIKRAAKINDHLIVAVLINSAKHPLFTVEERVAMLQECCKNIPNVTVESFDGLTVEFAKKRHASVMVRGLRAVTDFENEIQLAQTNHALMPGIETMFLATSIKWSYLSSTIVKEAAYYGSDISKFVTPNVEKAVNEKYAQLREREEIMKKIVIASACRTAIGKFGGTLANVPATELGSIVIKEALNRANVKPEQVDHVYMGCVIQAGLGQNVARQAALKAGLPIETPAVTVNVVCGSGLNCVNMAAQMIEAGDADIVVAGGMENMDMAPFALQKARYGYRMGAPMGKSEIVDTMVNDALWDACGFNKHMGMTAENVCTNETYQKKYGYSPITREMLDEFSYNSQLKADKAIKDGAFKDEIVPVVIKGKKGDTVFDTDEGPRLSAPEVLAKLKPAFTKDGIVTAGNSSAINDGAAALVVMSEEKAKELGVKPLATWVAGALAGVEPEVMGLGPIAATKKVMAKTGMTVADMDLVEANEAFAAQSIAVGEALGFDKDKLNVNGGAIALGHPVGASGARILVTLLYAMKHRGAHKGLATLCIGGGMGCATIVEMDMAFVKTEVQGAVEIITIDRPKALNALNPEVLADLKAAFEAVDQETVRCIVLTGEGDKSFVAGADIGSMSTMTKAEGEAFGKLGNDVFLMIEHFPIPVIAAVNGFALGGGNELAMSCDIRICSDNAVFGQPEVGLGITPGFGGTQRLARLVGMGMAKQLVYSALNIKADEAYRIGLVNAVYPQAELMENVLKLAGKIAKNAPIAVRNCKKAMNDGISLPIEKAVEVEEKLFGDCFETHDQQEGMACFLSREKPKPKAVFTNNMKIGVIGAGTMGQGIAKAFAQVEGNTVALCDIKQEWAENGLAKIKKGYEKLVAKGKMTQEKADAIVAAITPGLKEDLCADCDLVVEAAFEDMKVKQTTFGELDKICKPECVFASNTSSLSITEIGKGLTRPLIGMHFFNPADRMKLIEVIAGCNTPAETVEKIKEISVAIGKSPVQVNEAAGFVVNRILIPMINEAAFIKMEGVSDIAGIDTAMKLGANHPMGPLELGDFIGLDICLAIMDVLYNETGDSKYRACPLIRKMVRGGNLGCKTGKGFYVYNADRTKTPVDQLMDFTLSKQQQMVQKMYREFAENEVKPLAKKVDAEEYFPKETVEKMGKLGMMGIYFPTEVGGAGGDVLSYVMAVEELSKVCGTTGVIVSAHTSLCAAPIYENGTPEQKAKYLPKLCSGEWLGAFGLTEPGAGTDAQGQQTIAKEDGDYWVLNGSKIFITNAGFADVFIVIAVTDNVLDKRGRPTKLCSAFIVERTDPGFSVGKAEDKMGIRGSSTCELIFEDCRIPKDRMLGVRGKGFQLAMATLDGGRIGIASQALGIAEGALEETIAYVKERKQFGRAIAAFQNTQFELAEMKARVEAAKYLVYAAALKKQQAMDGAKVRYSVEAAQAKLIAARTASDVTRRCLQLFGGYGYTRDYPIERMMRDAKITEIYEGTSEVQMMVISGALLKMKAIVCVKQVPDTSGKVSVKPDGTLDRASMATITNPDDLNALEAALKLKDATGCEVVVVTMGPPPAEGMLRELLARGADKAVLVSGREFGGSDTFATSQILAAAVNKIGVGPEDVVFCGRQAIDGDTAQVGPQIAEKLHLPQVTYVADIQKDGNTLTVKRMLEDGYMMVKVQTPCLLTCIKELNDPRYMSVNGIFTCYDKPMEVFDYNALKDDPLIEVDTIGLKGSPTNVFKSFTPPQKGAGTMLQGDDVAAQLAGILAKKHLIMADFNEYKGVWVFCEQRQGALMSTDFELVSEARKLADELGCEVTGLLLGDNVEGIAKELGGYGADKVLVCDSPLLKDYTTDAYAKVVCDMVNEYKPEVLLIGATNIGRDLGPRCAARLHTGLTADATHLDIDTAKYIDFLKESSTIDLSKQKFDMEDRNLKMTRPAFGGHLMATIICPRFRPQMSTVRPGVMKKAPFDQAKADACQIVKPAFSLTAEDIKTEVLSVEKAAEKLVDLIGADVIVSVGRGISKDVNKGIELAEQLAAALGGGVVGASRAVTDAGWMTADHQVGQTGKTVHPKIYVALGISGAIQHTAGMQDSECIIAVNKNEGAPIFGVADYGIVGDLFKVVPELIKQIEAAKAALMEQIGAAVQYPAQQLLYKKHKKEAAAQKMCNGLSQFRLCYMKRAMNTVKNIAAAAMTLAVFFGFAGFKPVTANAAQAAMPATASVEEENSYFEEDAYQRSFLTLINNERAQAGLAPVALGDSNHNAAAMERAEELAVSYSYVRPNGQRDFTVLAENGISDVSIGENYMAGCSTPDSAMDQWMATDFTRERILNADATTVSVGYYEGGVYNNYWVLIFSYPENSHTEDYRQEVLNLVNAQRAKYGLTALKMGDDALTAAAQTRAEEISVVNSHVRPDGSKCFTVLKDYGVTDTPTGENAAWGSVSPEEVVNAWMNSEGHRANILNPEARKMSVGYYYNSNSTWGHQWIQIFTKMEDYRTVRGTATGEYEEKKSRFIAQLSFADSEEAAVAFLEQVRAANRTARHNVYAYRLRAGNRERYSDDGEPAKTAGTPALEVLQHSGLTDLIVVVTRYFGGVLLGTGGLVRAYTTATARALENAEVVTVRSVVELQVTVDYALYERASLLIDAAGAKQAPPEFTDRVTLRWQMPEHTEAPLLEQLRELTRGSAQVTVSDPFYAPFMDVRRRTEEIEHLTFAPWATFSDASRGRVVPEPQDPLRPVFQRDRDRVLHCKAFRRLKQKTQVFLSPEGDLYRTRLTHTLEVSQIARTIARGLRLNEDLTEAISLAHDLGHTPFGHAGEKALNDLCPDGFHHYMQSLRVVDRLEKDGEGLNLTWEVRNGIVTHTKGTWAATPEGRIVRLADQIAFVNHDIEDAVRAGVLDAATLPKDCTAVLGQTKSARITTMINSILTHSEGDVRMGTEEYEAFLALRDFMYATVYVDKNAKHEEQKVDKLIAELYEYYLTHVDQMSNFYVQLAYQEGRERAVTDYISGMSDEFAIRTFEELFVPQKWHVLMIPHEYIEELTRRTDIVELVGSYVQLKRKGRLYGGLCPFHSEKTPSFYVYPDTQSFYCFGCQAAGDAISFVKKINNISSGEAIKMLASRAGMPEPQEDDKTGRLRSRVLSMNKEAARFFHACLNSTVEEARQARAYWRRRGLDDKTIVRFGLGYAPNDGQALYQYLRDKGYNQQELDASGLFKRSQSGRIYCLFWKRVMTPIFDLRGNIIAFGGRVMDDSKPKYVNSPETLVYHKSETVFAMQIAKRSASRRFVLCEGYMDVISMQQAGIDTAVCACGTALTPGQVRIISEYADEVILSYDSDEAGQKATLRSLELFRNSPVKVGVLQIPGAKDPDEYIKKYGPERFQALLDGVGNALDFRLKRLRDQYDLSQDAQRLQYVKEAVEMLAERSNPTEQEVYAGRLAEETNISKTAILAQLGTAVKRAGGKYRREKNRELLRSGEMDQIKVPYSAGGSQALGIASAQQRLLAAILREPRYLELAKQQLTAEQFIQPQQKELYEAMLNCSREGVELSLTALRAFVSEEALNELSRLAAQYSDVNCTPDDIRLYLDRIARGMPVASKAAAMSGDEITQYLQSMREKKQGTLPEQDMQKLSQTEELARSLAAKAHRHTLTTEQISRAMEEADFDIAQLDELYAALEQRGVHLAEEEPAELPVLDDAQIGRLENELSSEGVALDDPVKTYLKEIGRVPLLTAGQEMALAKAARAGDAEARRALSEANLRLVVSVAKRYAGRGLPFLDLIQEGNLGLMKAAEKFEPERGFKFSTYATWWIRQSITRAIADQGRTIRIPVHLVESINRVKKTAGDLLHKNGREPTVEEIAAALDMEPDKVRELLQLSQEPISLETPVGEEEDAHLEDFIQDEDAGVPVDEAGRQLLRRELLHVLKSLTPREERVITLRFGLEDGRARTLEELGKEFNVTRERVRQIEAKALRKLRHPSRAKLLRDYLDEMMKVKPVKLGKTERMSFSHIDEVISMPNLIEVQKNSYQWFLDEGLKEVFHDIGTIEDYTGNLALSFVDFRLDKEPKYSIKECKERDVTYAAPLRVTARLLNKETGEVKDQEIFMGDFPLMTDAGTFVINGAERAIVSQLVRSPGVFYGHAKDKVGNDLYSATMNPNRGAWLEYETDAANVFYVRIDKNRKLPVTVLCRALGLSSNEDILNYFGEDERILATLEKDTTKNREEGLLEVYRKLRPGEPPTVESATSQIDMLFFDPRRYDLSRFGRYKMNKKLSLARRIMDHVAAENVVDPFTGEILVEADKKIDRKLAEQIDAAGVNLVVLKIDDPMKDQPHKVKVITNGCVDAQAIIDSYYPAFKGVDVKECGINERCCLKELRKILDNASSAEEVMESLKKDHDLLIGRTVTIDDILSSINYLNGLGYGIGTTDDIDHLGNRRIRSVGELLQNQFRIGFSRMERVIRERMTLQSQDQSVITPQALINIRPVVAAIKEFFGSSPLSQFMDQNNPLAELTHKRRLSALGPGGLSRDRAGFEVRDVHYSHYGRMCPIETPEGPNIGLISYLASYAKINEYGFVEAPYRKVKKIYDENNNLIEQVVTDEVEYMTADVEDEYVVAQANEPLDEGKHFIRPRVSARRRDEILEIDAEKVDYMDVSPRMMVSVATACIPFLENDDCNRALMGSNMQRQAVPLMVTQQPIVATGMEYKAATDSGTAVLAKSNGVVEKVDADHVVVRNEQGALEDYSLIKFARSNAGTCINQRPIVEVGETVTAGQVLADGPAMRNGEISLGKNALIGFMTWEGYNYEDAVLLNEKIVREDVYTSIHIEEYETESRDTKLGPEEITRDIPNVSEDALKDLDERGIIRIGAEVKSGDILVGKVTPKGETELTAEERLLRAIFGEKAREVRDTSLRVPHGAYGIIVDVKVFTPENSDELQPGVREVVRCYIAQKRKISVGDKMAGRHGNKGVVSRILPQEDMPYLPDGTPLDIVLNPLGVPSRMNIGQVLEVNLGYAAKACGIKVMTPVFDSARENDIGDTFDTAREMWHGENAPAYPTKLPKIMGEKGHIIDFSKIELDRDGKTTVYDGRTGEKFDNRVTVGYMYYLKLHHLVDDKIHARSTGPYSLVTQQPLGGKAQFGGQRFGEMEVWALEAYGAAYTLQEILTVKSDDVEGRVKTYEAIVKGEPIPQPGIPESFRVMLKELQSLGMDVIVQDKDGNEIDMRQNFDDEETGFDMRDVAGTETVVQESELTDYNIKDADAGFDDPSVLEDDNSGAEAPAASDEVDFMENNVFDSIKIGLASPEQIRAWSYGEVKKPETINYRTLKPERDGLYCERIFGPTKDWECHCGKYKRIRYKGKVCDRCGVEVTKAKVRRERMGHIELAAPVSHIWYFKGIPSRIGLMLDISPRLLEKVLYFASYIVTDPGLTPLDKKQLLTEKEYREMRDRYGDEFEAAMGAEAVQTLLKEIDLDQLSAELTAEVEKSSGQKRVRILKRLEVVEAFRISGNRPEWMIMDVLPVLPPDLRPMVQLDGGRFATSDLNDLYRRVINRNNRLRRLLELGAPDIIVRNEKRMLQEAVDSLIDNGRRGRPVTGPNNRALKSLSDLLKGKQGRFRQNLLGKRVDYSGRSVIVVGPELKMDQCGLPKEMALELFKPFVMKDLVEKGIANNIKSARKMVERAKPEVWDSLETVIKGHPVLLNRAPTLHRLGIQAFNPVLVEGRAVKLHPLACTAFNADFDGDQMAVHLPLSEDACREAKMLMLASGNLLKPSDGAPVTVPTQDMILGSYYLTTVRENDEGAGKVFRDENEVLMAYAEHVITLHAPIKVRRTMTIDGVERTGLVDATAGRIIFNNPIPQNLGYVDRTDPEHWLEYEVSFRVTKKTLPEIISRCMTRNGTRKCAKMLDAIKAQGYKYSTLSAISVAVCDAVIPPQKQELIAEADKEIAKVGKLFNRGLISDNERYNKTIDIWQKTTDKVSKALADNLPKDNEIYMMADSGARGSMNQIKQLAGMRGLLANTAGHTIEMPIRANYREGLNILEYFVSARGARKGLADTALRTADSGYLTRRMVDVSQDVIVREIDCGTTDGLWVSEIHEGKEKIESFRERLIGRFAVGDVVNPITGKVIVPEGKMIDLYDANEIEAAGITRLKIRSLLTCRAKTGVCARCYGSDMANGEPVRLGESVGVIAAESIGEPGTQLTMRTFHTGGIASAEDITQGLPRVEELFESRRPKSMAIMSEISGVVSQDDTKKNVVIKVTGKDENGAEEVKSYSIPFTQHSRVMPGDRVEKGDIITREGVLYPQDILAIKGLEDVQNYLINEVQKVYRLQGVEINDKHIEVIVRQMCRKVRVTDSGSSNLIGGALASRLEVENINADLQKRIDAGEEGLKLVEYQQVLLGITKAALANDSFLSAASFQETTRVLTEAAIKGKVDPLSGLKENVIIGKLIPAGTGLPEVREDLKNREAERDAEIAAELAASAQMPTFNQLVRKGREVLTTKSTAPALQKTYNSQKKQYSDLSSPQKRGVCTAVRTMTPKKPNSALRKVARVRLTNGIEVTSYIPGIGHNLQEHSVVLIRGGRVKDLPGVRYHIIRGTLDTQGVAGRNQARSKYGAKRPKAGAAKKMPRRGNIAKRDVLADPIYNSKMVTRLVNSVMLDGKKGVAQKIVYEAFSMIQEKTGNDPLETFEKAMENIMPSLECKTRRVGGANYQVPLEVSPARRETLGLRWLTAYSRTRGEKTMAQRLAAEIMDAANNTGNAVKKREDTHKMAEANKAFAHFRYMATPREVSLQMTRNIGIMAHIDAGKTTTTERILYYTGINHKIGEVHDGGATMDWMVQEQERGITITSAATTCYWSHSETQKDPVAFKKNRHRINIIDTPGHVDFTVEVQRSLRVLDGSVTVLAAKGGVEPQSETVWRQADEYKVPRMVYVNKMDTMGADFFRCIKMLHDRLHANGVAIQLPIGQEDTFRGIVDLVDMNAEVYYDDMGNDMRTEPIPEDMVEQAEEYRNILVEAVAENDEELMEKYLEGEEITREELKKAIRKETIANTLVPVVCGSSYKNRGVQKLLDAIVDYMPAPTDVEDIKGVNPETEEQETRPSSDDAPFAALAFKIATDPFVGKLAYFRVYSGKVEAGTTVYNSVKDSKERMGRILQMHSNHRKDIDCCYAGDIAAVVGLKNTTTGDTLCDENHPIILESMKFPEPVIRVAIEPKTKAGNEKMGIALAKLAEEDPTFKTYTDEETGQTIIAGMGELHLEIIVDRLLREFKVEANVGAPQVAYRETIRKEANQETKYARQSGGKGQYGHVKIKIEPNEPGKGYEFVNAIVGGAIPKEYIPAIDNGIQGAMKAGVLAGYPVVDVKVTLWDGSYHEVDSSEMAFSIAGSMAFKDAMRKADPIITEPIMKVAVIVPDEYLGDVIGDLNARRGQIQGMEAMAGTQRVNAFVPLAQMFGYATDLRSKTQGRGQYVMEPSHYEPVPKNIADQIIAGRTKGMAEKAKFDRSKPHVNIGTIGHVDHGKTTLTAAITKYLALKGDAEFMDYANIDKAPEERARGITINSAHVEYQTEKRHYAHVDCPGHADYVKNMITGAAQMDGAILVVAATDGPMPQTREHILLARQVGVPYIVVFMNKCDMVDDEELLDLVEMEIRELLSEYDFPGDDTPIIRGSALKALEAPNDPEDPAYACIKELMDAVDSYIPNPDREEDKPFLMPIEDVMTISGRGTVATGRVERGMAKVGDAMEIVGIKPDRLNTTITGLEMFRKSLDFAEAGDNIGALLRGVDRSQIERGQVLAKPGSVHPHNVFEAQVYVLTKDEGGRHTPFFSNYRPQFYFRTTDVTGIITLPEGTEMCMPGDNVMMHVELLTPVAMEEGLRFAIREGGRTVGSGVVGKIIEMLYLDYSANTPVDEEVLQCFCEAERRYPGNANAHHQAGATAKAAINEATRSIARCLGAPPAGIIYTSGASEANNLAVKGLAALGGAAGRHILSTPLEHSSVSGSLEALQKQGYEVELLDILPDGTVDLADLKKRLRPDTVLVAVTAVDSELGVVQPIAEIAELLKAYPNCHFHVDATQAVGKIPVQFEGMDTMSLTAHKFYGLNGIGVLVKRLGLALPPLIHGGESTTPYRSGTPTVALACSLALALEKATAELPARAATVRSLNDRLRAELSRYPKVRINSPANAVPHILNLSVQGVKGTVFQRELDTRGVCVSVKSACSSDGLPSRAVLAVSQDRRNALSSWRISLSHLPQKRKRPPFCTPLQTAITPMLESPKSAILIKKAAALLLPCRSGSGCWKEHKKKGRSTMFKRERLHSCFFPIFVWRSCSMSEKIDYSKGVYDAKKLGTGRMFILGVQHMFAMFGATVLVPLLTGLSVSTTLLCAGLGTLLFHLITKKKVPAFLGSSFAYLGGFSIVAPMLADADGNLTVANTKMLPYACAAIAFSGLVYLVASLLISTFGIRRIMKFFPPVVTGPIIISIGLILAPSAITNCQSNWLLAFVALGTVIVCNIWGKGMVKILPILIGVLVSYAVALVTGAVDFQKISEAAWLGIPLHKEAMGLFAIDGSPEFISALFTIIPIALATMMEHVGDIAAISATVGHNYINDPGLNRTLMGDGLATTMAGLLGGPANTTYGENTGVLALSKIYDPLVIRIAAVLAIILSFSPKFEAVINTIPTGIIGGISFVLYGMISAIGVRNVVENRVDFTNSRNLIVAAVILVCALGFNSVGGVGFTVGSVTINLSGLAVAAIAGILLNAILPGNDYEFDATAGSDAATSGNLQVMKKYVCTVCGYIAEGEIPAQCPVCKAPASAFVEKTGNTYVTEHVVGIGKAEGVPQEIVDGLRANFEGECSEVGMYLAMARVAEREGYPEIAEAYKRYAYEEADHASRFAELLGEVVTDSTKKNLMMRAEAECGACAGKMDLAKKAKALNLDAIHDTVHEMAKDEARHGRGFEGLLKRYFNTEVMEQFNVTGMSCAACSARVEKAVKSVPGVTGCSVSLLTNSMGVEGTAEDAAIIRAVEQAGYGASPKKAAAAASTSAELDALADHETPKLKRRLIASLGFLLVLMYFSMGHMMWGWPLPRWFDGNHIAMGLVQLLLAGIVMVINQKFFINGFKGLVHRSPNMDTLVAMGSMASFVWSTYALFAMTDAQLHGNEELVMHYMMEFYFESAAMILTLITVGKMLEARSKGKTTDALKSLMKLAPKTATLLRDGTEVTVPIEQVQKEDIFVVRPGENIPVDGIVLEGSSAVNESALTGESIPVDKAVGDKVSAATTNQSGYLQCRATRVGEDTTLAQIIRMVSDAAATKAPIAKIADTVSGFFVPAVISIAVVTTLVWLLLGRDVGYALARGISVLVISCPCALGLATPVAIMVGNGLGAKNGILFKTAAALEEAGRTRIVALDKTGTITCGEPTVTDLLPAVGVTETELLTLAAALEGRSEHPLARAVLAYAEEKQLELPSVTDFTALPGNGLTAKLEGKEIFGGSAAFISTKVAIPAALQTQSAALAAQGKTPLFFGGAGRLLGVIAVADTIKEDSPQAIRELRNMGIRVVMLTGDNQRTAEAIGRQAGVDEVIAGVLPEGKEAVIRQLQKYGKVAMVGDGINDAPALTRADTGIAIGAGTDVAIDAADVVLMNSKLSDVPAAIRLSRASLRNIHENLFWAFIYNIIGIPLAAGVFIPLGLTLNPMFGAAAMSLSSFCVVSNALRLNLFDLHSAKRDHPPKHVPALPAALVQPAAEEDTTQKEETTMKKTLTVEGMMCPHCEARVKKALEALPQVDEAVVSHEAGTAIVTLNAEVDDEVLKKAVEAQDYPVTGIQMEESKKRCCCCDDAPEVDTASDTAVPCCCRHKVRSPEEHKALLNRLNRIEGQVRGIRGMLEKDAYCVDILVQVAAANAALNSFSRELLAQHIGSCVADDLRAGSDEKLEELLRLLPKLMKMIQGTYYKEWSTVLGREMEFKVYGHAGVPVLALPARGGRFYDWENNGMPDAIAQLLNEGKVQLFCADAMDGEGLLNGDLPQRRRAELQEKYFVYLTAELAPRILTLNNAKKGTRIWTAGVDLGAYHAVHCRLRRPTLFAGAVGMGGIYDLTRFWGTDSDDMVLRCAPLAYLQENGIANKPALTKAEENSLILCAGQGAYEGDALDDTQALADLLKDQGMPAHLEIWGGDVSHDWYWWGKMWSLFAPRILEVKMSLPVDPIMLLSVVNLKLRDQYKDLDALCEDLEADKAGLCAKLHTVGYDYDPQRNQFVMAKCECCGKGVTFGIKVSHSHRRSNRTWKPNVRRVKAVVEGSPKYVYACSRCLRAGKVTRAVMKYGIKIISLTILPEIQRKSKSFFKFSVAFCIPGAVGLVQGTKKMTAQATYYIIRALVALVAIPFHEAGHALAAWLLGDATAKREGRLSLNPFAHFDLLGTLCMVFAGVGWAKPVSTNPRNFKNPKWGMALTALAGPVANLVLAYLGMVAWKVMYYWAPVNNATIYIAMFLRYLVLMNVSLAVFNLIPVPPLDGSRILLVVLPQRIYFGLMRYEKYIMIVMLAAVWGGFLDTPLYYLNNVVWSLLGAGTGYIDKIAYAVYASSLGAVIMAEELTFHLEDFDGPLELLLALVAKHKMDLHNIPILQLIDQYTRTVEQADPDPETASAFIEMAAHLVEMKSFLLLPRSEEGERMKQELTGQLIEYDQCRRMAALLRAKGEAAPVFVRRPMEVEWDNTYALHHAPQILADYWQALAGRTKTRRVPTQQQFEPLVTAPMVSVTSRVVYILRRMLGGTVAKMEQLFSRSQSRSTNVATFLALLELVRGGRIALDDRGALTMRRTRPERNKENPMNQKQTLAAVEAMLFACGDPIGADKLAQAVQLPQSSVDAALETLHTRYQREDSGLCLLHLNTRWQLATKTQWADCVRRVLDSRRAVPLGPAAMETLTVIAYNQPVSRAFIEQVRGVDSSSSVSGLLEKGLIEEAGRLDLPGRPVSFRTTDTFLRVFGLSSLADLPPVHSDAPADDPTESEGMGMVLSAVGACLLFVLKAVGILLLIILVLAALLLLCPFCADVCWQNDTLTVKAGALGITFPVFQYPKPEPPAQPEEPKGFTSRLKTKFRAWRAERKRKKAEKKAAQPAKPKTEKPPRQKAKITLDVICTMLRGVGTLLRAVFGVLRFTKISVCLGVRGDDPAAAARNYGKLQAWLYPTLGVLDHFLFLEFDQLRVLPDFGSAQPTVPDKVSFRVSAQALFIVIAAVRVLYEFWRKKVLDIFIMAEHPIQGLMNVTMEKIHQMVDSNTIIGKPITTEDGITILPVSKVSFGFASGGTDFNGKNAANKDLFGGGSGAGVNIQPVAFLVIKDGCVRTIQLSDSSNSIDRALTMLPELVEKLTTLVKKDAKAPAEEPKAEMAEERIQKIMAEQGLCSRRAAEQIIAEGRVKVNGHPVKVGDKMDPNRDVLHVDDERIYIQKNQQLYYLALYKPRGYVTTASDELGRKTVMDLVSDIPARLYPVGRLDKDSEGLLLMTNDGAFAQAVTHPSGGISKLYRVTVQPRADEATILKLSSGVVLDDGTKTMPCAINVVTDEPGRTVMEMTLKEGKNREIRRMCESVGLEVVRLKRNAEGVVKLGMLKPGTYRELTKAEVNGLRAAAVKGRAQTRSAAQQSKAAERRPRGPVGKNTPRKQKMERETLKSRLGFILLSAGCAIGIGNVWKFPYIAGQGGGGAFVLFYLIFLVILGLPIMTMEFAVGRASRKSPVRAYQALEKPGQKWHIHGYFTLIGCYLLMMFYTTVAGWMLHYFYMTAVGKLAGLNAEQVAGKFTEMLASPATMTFWMVFVVVVSILVCAKGLQSGLERVTKGMMIALLLIMVVLAVNSLFMPGAKEGLSFFLVPDFARMQEVGVVNTLVSAMNQAFFTLSLGIGAMSIFGSYIGKEHSLLGESVRIVVLDTFVAITAGLIIFPACFTYHVDQTSGPSLIFITLPNIFANMSMGRLWGSLFFLFMAFAAMSTVLAVFENIICCGMELTGCSRKKSSLVNLVLIILLSMPCVLGYNLWAWDGFAVFGGAVLDVEDFLVSNLFLPLGSLVYLLFCVTRYGWGWQNYKKEVNTGEGLKVQDWMRGYLTYVLPLIVVFIFAFGLYDKFFAMHILVCDDDAAFAARMDEYISEWFRAREIQVQSTVCTSGEQLLATPELERYQLAFLDVDLKTTDGIALGRKLRQIAPDIVLVYISAYLEFAPQGYTVNAYRYLLKRDIAAQLPSCLEDIFSGMSDPRKTLEVHHNRTTSEIPLDQIYYLESDLRQINVYGDIPHQPICTFYGKIADLPAMLYENGFLQVGRSDVVNLQYVRSIRNYKVELRSGVELSVSRQYYTAIRSAWLEWKGQFGDEMNEEFWRWYVYGHWICLAQWLGFIMVEYAYLGKGKIKHPLVWSCVITMLTMTLSVVYNFGFFTPRAVALTILFLFITVMLFGGTPGQKFTACLINGTMCLLVENSMRYVISWILKCELQQVIQRADCLIIIAVANLVVGAAVAFLVSKWRRRNALEPLQALTMSFFPGVVVVLNILLMLTDNNKRATMATMGMTVGLTVAVMVHLCIVAMFNDQVMQRRSLHFQAELEQQRASALLDSYTAQRRLTHEFTNHISALRALLEQGDVGGAQDYIAGVDKAVAASTTIMDTHNPLLDSILTRKYEEATRQGVSVYFDLCDLRDFPLSGVDMVTVLANLLDNAICAAAQAYPPEVYVRVRKTEEEYLLSVRNRVQRDVELPPDGQLPRTTRKEPGHGMGLSNVRDVLLRHGAEYTLSCRDNWFRFTCAVPTGNSMQRTTPRLAYVIPVQQAAPELRRIEKLYRLQPPKGPPQKVPSARYCAFLHSPKKAKVGSLFTRTAGCFSIQQQSFMLNIDEIQNGIVIDHIKAGTAVGLMDLLGIAGNRTASVALIQNARSKKTASGRKDIIKVEGDASWLNLDVLAYLDPNISVTIIENGKAVRKEQPKPPKRLVNIVRCKNPRCISSIEEECDQIFELSSNGKYRCIYCEQELQVKPEMRHLIDPLDLTQQEITQLLDLADRICADPAAYQEVANHKKLATLFYEPSTRTRLSFEAAMLNLGGHVLGFPSENVSSATKGESVADTIRVVSCYADIVAMRHPKEGAPLRASRYSRIPVINAGDGGHQHPTQTLTDLMTIRRRMGRLDDLTIGLCGDLKFGRTVHSLLKTMARCKNIRFVLISPEELRVPDYIINDVLEANGIPYKETRSLEESMPELDILYMTRVQKERFFNEEDYIRLKNSYVLTREKMAQAKPTMAVLHPLPRVNEIALDVDDDPRAAYFEQVQNGVYVRMALIMTLLGLADPKAPKEENMKDPALASSSRLGGAVISDRVVASLLEELTNGRYAQADRLPAEVDLATELGVSRTVIRDALSEMERAGYVERVRGIGTVVNRAVLGLRSRLDQKLEYYPLIRSFGSYPHADGIQVMLLRAGEEMAHALALEVGDEVICIKKRILADTTPVIYSIDYLPRSLFGNRDYTRIDLTGDIFEILEQECHQQISSNVAHLKASCGDEAIRAAMRLAPGEAMLLLDEVCFNRLCRPVMRSLSYYTNFFDFSILRKLLMDYFLQKVGGRPARQAVTLRRCTPVEAPAVFALQNEVRAAMPHPEQFVPDTLENIADYLRTGVCIGAWQQGRLGAYLILRLCGQSDENYAAFLGVPQSQWQHWANADSAVVHPDWRGNGLQRAMLEAALPLLPPQITHLGATVSPDNSYSLHNAQASGFVIRCRREMYGGYDRYLLEKQLMAASLGQEFCTLRDTYIEKQFGRLNDMQRQAVFTTDGPLLILAGAGSGKTTVLVNRIANLIRFGSAHGSKETPRPVTEEDVKALRTAIMTGTDAPSWLDGMLRQNAVRSWNVMAITFTNKAAGELKERLRRMLGGEEGDEVFASTFHSACVRILRRWAEEIGYPRSFTIYDTDDAQRVMKTVYKELSIDDKFLPIKAAINQMSRWKDQLVSPEQALADHARDVKSTQTARIYAAYEKKLKEAGAFDFDDLIYQTVQLLAEHPDVREFYQNKYRYLLVDEYQDTSVAQFRLVSLLTGPERNICVVGDDDQSIYRFRGATIENILNFEKLYPGTKTIRLEQNYRSTSNILNAANCVIQHNTERKGKTLWTDNGEGDKVQVYTAENEQDEASHIADIIGQHLKEGGHLADHAILYRMNAQSAPIESYFTRAGIPHKIVGGQRFNDRKEVKDIHSYMSIVANPRDDVRLRRIINEPARKIGATTVDVIADLAGQQGVSMLDIISHADQYAKLSRAVMPLLKFWQIYQRLQDSLATRTLDEFASDVIELTGYKAMLEADAAKGHEDAADRLQNLGQLVNNVKNYCDQHGEEATLEGYLEDIALISDIDSYNESSDQVVLMTIHSAKGLEFPYVFLIGMEEGVFPSEMSKYSEADLEEERRLAYVGITRAKKELYISNSVTRMLYGRTQRNEPSRFLREIEPEYIEETRSPVLEQRSHMGGWGSEYSDTVPGGASGYSGPSGYSRSSYGGGYGSSYSSGNRSGYLNREYNAGESRGFGSSYGGRNPASSGFGSHYGNSSTQPTTRSSGFGSAYSGGNATKNTVKQTAFTVNSAVKPAASGSKHYEPGDIVEHKVFGRGTVLKVKPAAGDQIVEINFEKVGIKKTMANFAPLTKITEEEMMTVRLIAHTPEPEKVVAAAAKLCYSDAHITDLLDGLDEEKTAKFLTMLSDLGHASPIEHASFTFGIEGVSRTLLAQITRHRIASFSVQSQRYVRLDDFRYVTPPEIEAIPEAKAAFLASMEEDAQRYLDLAHKLEEGHTARLMAEGMPEKQARAKASKQANEDARFVLPNACETKMVVTMNARSLMNFFQLRCCNRAQWEIRELAEKMFALVYPVAPHIFAKAGPACLCGPCPEGKMCCGKTAEVRAKYAAIKEGAAVMSKGKLIVLEGLDGSGKATQAKLLAEHLAAQGVPVQKITFPDYASDSSALVKMYLAGQFGQHPDDVNAYAASSFYAVDRYASYKTSWGSFYEQGGVIIADRYTTSNAVHQCSKLPQEQWEEYLHWLFDYEFRLLGLPAPDRVIYLQVDPAVSQRLMTQRYHGDESKKDVHEKDTAYLARSRAAAEFCARHLGWDTVHCTSGDAMRSIEEIQQEVQQLARKTLGMYRLMQPSDEAAVLALWQSQHHDTEDFAKMVLERFAGVQNIYVADENDAIVAAALAVPVTLQGRTGNYLCLCGEGSLLLAGLLDTLCAHQKLRGAGFTVTVPADAAQAALLQDKGFAKAFALRCLPREVSRNLWSQAEFDTVTAKKLCELREQFWKDTVQLSPERMAVVLQELYARGATIVSNEHGYGIYFRKEDTLYFVEMMADSDRAAEILMEAAREKEVIVEKAVITVGAAQPLFLGEGTRQEYGMIRFDAEPFDVSESYLRLMLENMAHNDTHAARKKGGAGKILLVVLLLLLLAVGAAVHFAYNEIHGNGAPGSTEVTVSIPQGSGVAAIANKLKEAGVIRSAYLFRWYVGEKGAAAKLQYGDFVLQTSAISYDAIIATLSQYAKAETVRVTIPEGTTAIAIAQKMEAAGLCTAEEFLKEANEGDFSTYTFWQYVPEDKDAPNRFMKCEGYLFPETYDFLKDDTVHNYVATFYAQFDAQFTKGMYAALKKQDMTLPELVTLASFVQEEAGNSQDSNVAQVFRNRLAEGSPYPRLQSNTSSHIQSDADNNYLWNWVAPYYGGWDDIPENILAAYDTYSCIGLPAGPISNPGLAAIKAALEPQPDEEAKDAYFFVTDLKGNYYYAHTLAEHNANCKTAAAVNKNLKNMLQIPELLAPAGDAERLRYAINYGADAVYCGLPEFGMRSAPANFTPEQLTESVIYAHARGRKVYLTMNTLPTNEEADRLPEAIKEAAKAGVDAFIVADLGVLDACKTFAPDIDVHLSTQTGITNWAAARAAYKMGAKRVVLAREMTLQDIAILRDKTPPELEIEAFVHGAMCMSVSGRCLLSNYMAGRDANRGQCAQPCRWKYYLSEETRPGQLYEIGENENGSYILNANDMCTAPFIDLICKAGVDSLKIEGRAKTFYYVASVTAAYRKALDTYLADPTNDNFELPPEVYAELTRTSHRHYSPGFYFGREQAKQATDSATYIREWEFVGTVDNWENGIAHCQQRGKWSLGDTLEALCPDGRSIPLTPEWIENEAGERVESTPHAMEKYTMPTPELPPMSLLRRKTVMKQHNASDRYALLDELRGLDLLSMMLYHGCWDLVNLFGIQADWYYGLPGHLWQQSICWVFILLSGFCVQLGHHTLRRGAQVFGAGALVTAVTLLFMPEDRVVFGVLTLLGSAMLLTGLLEKPLRRIPPAAGFAISAVLFALTRNVSAGYLGFGSLRLWLPQTLYANYVTAYFGFYPWWFYSTDYFALLPWLFLFWAGYFLYGIVGRQRMEPLRCSVCPPLGWLGRHSLLLYLLHQPVIYGVLLVVFRVLGGMSKVAIVFWSATGNTETMASCIAEGAGANGTIVPCAEMTPAKLAEFDVVAFGCPAMGAEQLEESEFEPMFAALEGSLNGKKIALFGSYGWGDGQWMRDWAQRAQDDGAQLFSEEGLICNETPDDDVQAACRKLGADLAAWMENIGVTCDVCACCHNVDGCKCDLPQIKVTEQCSCTTQQVETPHYCQSYEEKMYKSIIFDIGGVLVDFDPKAYLVDRLCNAEMEEKVYDLTFGSEEWQLLDAGKLSRYDGNQRMLEHARAEGCAFEVQGVLDDWMHILRPRLRMLELVRRLKNHGYCVYYLSNIPQDVLELLTERGVLAQFDGGVASCEVQVNKPDPQIYKALLKKYQLKASECIFIDDRLENVQAAFALGFAGIQMKDSVGTLIRSLATCNVALRMTIRELCEKEVVQLEQGMCLGRADDLELDPATAQLQSLILLGRPRLFGLLGRDESLTIPWQEIETIGTDAILVHTAVPKAPAAPHGFWQQLRAKLGLMKTSKPLLTLRMLFPAAASFIVLLLGEWIARGSLTADTFISFIFPHFGAYLLAWLLLFLVWELLDWVLRIPPLATLGMAVLGCAPCAVNFYTMQLRGEPFLPWDLMQVSEAAGVASAAGLKLQTSMVVSIVLVLALTVASFFVYRGRLRQRWLPRLAGTGASAAALCLLIFGVYLQPAVTQVLGITPDAWMQDRYYRYYGVLTGFMTNLTNLEIAKPEGYSEQAVDDILDNVAESEKFSTGPMYAGSYAATTPKEEQAKQPTIIYVMDESYWDVSELEQYGITFDTDVSQNLHALQQTSAYGRAYSPSFGGGTCDVEFEALTGYSVSFLPSGSKPYQQHVTKPMFALPNYLKLKGYQTAAVHCFWAKYWSRDKAYPNLGFSDFISLEDMHGVTKVRKHYWTSGLVTDDSMADQIIQQYEKMSTSSDKPIFLHAVTMQNHTNYNRDNYPDDERVHVVSHPVGLKSSTVGALEDFATGIRDADAMLGKLTEYFSQVDEPVILVFWGDHYNPIDSNYDVYTTTGYASGSSTDPRLHQTTLLMWSNYSQQQVDFGTIAAYDISPVMMELFGLEQPLYFQFLNRQLRVASRSCTRGTTMNLDGTTTQQPTEFQQRWTNEHWMLQYDLMFGKGYALNRMGVAGLSGMNTGKMAVVSMKQLLEAGVHFGHQTRRWNPKMAKYIFTERNGIYIIDLQKTVKKLDEAYNYVKEVAAEGGDILFVGTKKQAQESIRDEALRCGMHYVNARWLGGMMTNFRTIRKRIDRMDQLAKMKENGTFELLPKKEVAKLELEMEKLDKYLGGVKNMKTLPKAMFIVDPHKERIAVAEARKLNIPIVAIVDTNCNPDEIDYVIPGNDDAIRAVKLIAGAMADAVLEGKQGNQEAAPAEDAANAMAISAKDVMELRKQTDCGMMECKKALTEADGNFEKAIEILRERGLATAAKKASRVAAEGMVYADYCPACKVGVVIEVNAETDFVAKNDKFVDFVKEATKVIMKQNPADVEALMACKTEAGETVDEALKNLILVIKENIKVRRFTRYEGVCSAYVHGGGTHGILVNFETTNDIDAKDEFVAYGKDIAMQVAAANPGYVDEASVPAEVVAKEKEIMLAQMAQDPKTANKPEAVKAKMIEGKIKKFFKENCLVDQEFVKDGDLTVAQYTAKVAKDLGGEIKIVKFARFVKGEGLEKRADDFASEVASMVKMKRISVKFQQQEQTYRSLHAAARSLLSSKGRVFLLFLLFYKVLTNFLFVPALQLIWALTLRFAPIRYLNNKTASRIFASPAIIGCIVVLAVLAAFWSLYEIAAMLQLLTRVRHGEPLRVGAVFRDAFRSLVRVFLPQNLPLLLYGVALIPLTNFFLAANHLTQFAVPEYLWGLLKARAANRFLFALAVLCVLALLLDGLVVLPKFLLERKSFGCAFAESLRVLRSRTGQLLALALRWMLTATVRTGLMLLCGALLFYCVILGVGFASTAALLALSRAALLIELPFLCLLMDCAMTAAQSTLTEALYEVTRQSDAAQPTISGVLPALPREQTVLAGMMACAALVTCGVAAVYLLFPQTQPLQSVLGLSDPVITYHRGYSSRAPENTMAAFETALEHGSPRIELDVQMTADGVAVVTHDTSLRRCTGCNANIYDLPYAQVQQLDAGRWFHRQFTGSYIPTLEEVLALCKGKTELNIEIKPSTFTPTLEAEMVRLIHAYDYGADCVVTSQSYETLCKVKELDPDITTGYILALGVGTYYDLPAADFFSVESTFITAGMVQQIHLRGKTISAWTINRQQDAEKLLQLGVDDLITDKPEIIAPLLARDKALDNRLLWLRDQIQELLAAPDAEEAMEVEETIEDAIEDPEEVLDEAMASKINKGEILAKFFDDGEYTALFADGAVSTACGYAAGQQAYAVYQNGEAVTVKDVEKNIKVLEMAAQTGCPVVTFYNSVGAKLAEGLDVLTASAKLNAQIAKVSGVVPQVAVVLGVCGGTSALSAANADVCIMAEGAELFFTAPFTSAAKGDKVADAGSAAAAAKAGVASIVAADAAEAAEKAAHIVGLLPANNLTGPAIFEFEQPTAVLAAGAEPAKAAAAVIDKDSAVELYAGFGKSVYTAFATIGGNAVGVVATGKQLCHNCVAKASRFVRLCDAFSVPVVTIVDTEGFVPSVTDDVAGGIREAARLAATYADATTAKVAVLAGKAVGPVYTTLAAADLRIAVTGCTVSALEPSAAVSVLYKDEIDASDNIIAATKAKAAAYTAEVCSAASAVAAGAADMSCDAANVRASVVAALELLSTKRAARLPKKHGNMALMKYYNITVNGVAYSVSVEETAAGAAPVAAAPAAPAAPKAAPAPAAAPKAAAGAAGAVAVKAPMPGNILDVKVAAGASVKAGDVLVILEAMKMENEIVAPQDGTVASINVNKGDTVNSGDVLVSMNMAKKPIKVTEVVLRDAHQSLLATRMTMDEMRPILPEMDKINYFSVECWGGATFDSCIRFLDEDPWERLRILRKELPHQKLQMLFRGQNMLGYRPYADDAVEYFVQKSVANGIDVIRIFDALNDPRNLQTAIKSANKEGAHVQGCISYTLSPVHNNEYFAAYAKTLEEMGANSICIKDMAGLLTPYTCYDLVKKLKETVSIPVDIHSHYTAGLASMSILKGIEAGADIIDTAMSPLSLGTSHMPTESLVAALQGTDYDTGLDLKQLNVVRAYFAKLREKYIANGQISPKSLGVDANTLLYQVPGGMFSNMLKQLKDAGKEDKLDEVLAEIPRVREDAGYPPLVTPTSQIVGTQAVFNVIMGERYKMVTKEFKGLVHGDYGKTPAPIKPEFTKKILGDEQPITCRFADTLAPEMDKLKAEAAKWATQEEDVLTYAMFPQVAPKFFDKRNAKKQGVDGDHVDYTNQSHPVMRSIPEQRIAEFQEQDYQLYFGISKLEFDRMLKALHEAYRQEHKRKTRFTKISMMDKLILTLIYRYEYRTMESIAKEYEVSLDTIADNIHWVERTLLNADILQTSVTCVYKTNMKTRGYIFYKGKTSGKAVTAAAMLFWLRSSKNENCVFCTDAVCTLNFSEKNSKMMLYVSMILSMTGFGRGTAVLNGREITVELRSVNSRYFEYSSRIPRTCSSLDSRLKKQLNQRISRGKVELSMTVQNVDAADTVVAVNMELARSYQQAMRDLSEQLGVKNDVSTAVLTRFPDVLTTRHADVDEEQLWQDVSAVTAQALDRFVEMRAAEGAKMKADVESRLVFLEQCVGKVESLSAGRVENYTNRLYEKLKVILQDRDIDDARVLTEAAIFGDKTAVDEETVRLRSHIAQYRDILQLDEPVGRKLDFLTQELNRETNTIGSKCQDLDITRIVVDMKAEIEKIREQIQNLEMKLINIGFGNMVSAGRVVAVVSPDSAPVKRLVKEARERGMLIDASYGRSTRAVLIMDSDHVVLSALQPETVASRAAGQEGRASMEEETSHGEMANDKFLFVVSGAAGTGKDSVVKALREAHPEIEKTVSATTRAPRPGEQEGVDYYYRTREQFQQLLENDQVVEHNFYNGNYYGTLKSEVEKRLEAGKVVVLVIDVHGAANIRRMFPGATTVFLLPPSVEELEHRLRGRGTETEESIQERLATARQELAEQDKFTVKLVNNQIEPCAAELYQVICQRAGLQEMPKTVGVAVSNATFHFDKLYTYAVLPEHQNAVRLGSMVLVPFGKGSRARMGVVLACDAEPEHSKLKYLFDVAPASACLTPELLRLVHFLKERTFCTYYEAVKAVIPYGAQYKPAVAADGVTPVLQKQLTHHTENAYKLVGTLPQKPKPTAKQLAAVALLSGGPRTLNELEDKGISRAVLDNLCTKGVLECSKVNKSIDLYASIPLRNDPITLTEQQQAAYDTLLPKLEDTAPHSALLYGVTGSGKTLVFLKLISRCLELGRKALVLVPEISLTPQMILRLKGQFGRRVAVQHSALNHTERLLQWQMIQDGGADIVVGTRSAVFSPLENIGLIIIDEEQEHTYRSESAPRYSAHEVARQRAAENGALLLLASATPSTESFYAAQNGRTQLVRLTKRYGGNPLPSVQIVDMRAELAAGNPREISLALEDAIRRNLEAEKQTILLLNRRGYQTIAQCEDCREVLKCPKCSVPMVYHKSAHKVLCHYCGSQQEPPPTLCPACGGKLQYRGFGTQKAEEELAKLFPEARVLRMDQDSTAAKDAHEKLLAKFAAHEYDIMVGTQMVAKGLDFEDVTLVGVLGIDSLLFAQGFRAYENVFSLITQVVGRSGRAKEPGFAIIQTTDPDNPVLTLAAAQDYDAFYEQEIAYRKLGLYPPFCGLCIIGFAGAKENEVARAAARFSALLGQQAAKQPDLPLRILGPTPGSIEKINDTYRYKLTVKCRNDRRFRDLVRSTLALYEKEKLPSKASVVVDLHSDGDIMAIRNIVKEGDPILNKVCRPVTNFDDRLATLLDDMRETMIAADGVGLAGPQVGMMRRLFVVWDTTDAPEEIPEDYEYKFIDFVNPEILAVSEEEETAYEGCLSFPGHNGAVTRPVAVKVRAQDRNGEWFELEADGLLGRCIQHENDHLDGITIMESSEYFYEDTEEGKKAAREAKGNNMRILFMGTPDIAAECLKALYAAGHDICAVYTRRDKPVGRKQVLTAPPVKEVALAHGTPVFQPRTLRDGSEDDTIRALAPELIVVVAYGCILPKSVLEMPRYGCINLHVSLLPKYRGSAPVQWSVLNGDAETGVSIMQMDEGLDTGDVLYCKKITIDPEETSGELFDRVTAVGAEALCETIPQIAAGTLTAVPQQHENATLAPMLNKEMAEFHLTDTATHIHNWVRGMNPWPGAWFITSGGKKLKVMSSRVAAAHGEAPGTVLATKPLTVACGEGAIQLLEVVPEGKKPMDGTAFAAGLRLKTGDSLMAANPRAAAVAALVRQEQNGFSNLVLDAELKRQKLEGRDKAFASAIFYTVLEHRGTLDYILEQFLPKGLAKLDAPVREILRAALAQARYMQVPVSAAVNEAVKLTRTFKKSSASGLVNAVLRKACGYDLDAAVFTGEIQRLMVLGSAGLDVAEFLHKNYPDEALGILTYQADGGLTSLRANPLKASAAQLCALLTEQGAAEVRQGIVPGSVLARFAGSPADNELFRQGYYHVEGQASQLAALCVGAAPGETVLDLCAAPGGKTILLAEQMQGTGILYSCDAAENRVGLIRTAVDRMGFTRVHTLCNDATKPNPALPMADRILTDVPCSGLGILAKKPDLRYKKLEADRQAELLATQAAILDTAAALLKAGGRLVYSTCTIDPAENQQQIAAFLQRHPEFAVCAPEVPLPAGMTAGEHGCLSVPTRTGMDGFFLCVLQKATGTQMEQKRCISSLTLAELTDELKALGQPGFRAKQIFHWVHQKLVTEFSAMTDQPKTLLAKLEETFYIAAPQIERRQEAKDGTVKYLLRMADGNCIETVVMRYHYGNTVCVSTQVGCRMGCRFCASTQAGRVRNLEAGEICSEIYTAQKDIGERISHIVLMGIGEPLDNFDEVMRFLENITSPEGVNIGMRNISLSTCGLVPKIDQLAEKKLQLTLSISLHAPTNQIRSSMMPVNDAYPVEQLIQTVRRYQETTGRRVSFEYSMVRGVNDSDVCAKQLADLIRGMGAHVNLIPINPVDGSPYSATDAANVRRFQQKLESLGVNATVRRRLGSEISAACGQLRRDEMNGKAMKLAGKTDVGRVRQDNQDDYRAGELPGDAAWALVCDGMGGARGGREASQCACSVIERCFQEQYNQCIPGEEETFLKKALLSANRYVFQKALREESLAGMGTTAVCALVRGGKAYLSHAGDSRAYLYRDGKLAQLTHDHSYVQELVDCGTITQEQAEHHPQKNIITRALGVDYRLEPEFTTVALQAGDVLLLCTDGLTNAVPTEQLEQLLRSGSFYDLPDVLIRTANENGGPDNITALLVGVEPMEVRHGMDNLIGKRLDGLYEVQELIGSGGMANVYKAVMRGQNGPVPAGTVVAVKVLRREYMHDPDLVRRFKNESKAISLLNHPNIVKVYDVSVNDHLQYIVMEYVDGMTLREYLNERGGKLSSRETVHFISQILKALEHAHANGVVHRDIKPQNIMLLDNGQLRMMDFGIARISRADNQMLAGKAMGSVHYISPEQAKGDETDRTSDIYSVGVMMYEMLSGHLPFDADDVVEVAIKQISDEPRSLHELAPEVPYALVEITEKAMAKLPQNRYPSARAMLEALDTYVQNPSVLFEYQYITEEAPEKVVKRTMNQNRAIRQNEQPAPRKKGKGKPGKKRRTVFLPALFGITIAFALACMALCWMILNDSSNLMNNKADVTLGDYIGMTKDQAMATDQIASGQISPEWEEEYNSNYAAGYIYKQSPVSGRTVREGQSVTLTVSLGTQYVTVPDLTNYVQTDAEQQLKALGVSVLVTQAVDTSVASGAVIRTDPAAGTQVAAGSTVILYISRPQVSTTTKVPSLTGMSVDDARTLLVQNHLGLGSQSEEYSDQPAGTVLSQNPAAGTTAKLNSRVNVVVSAGAAPVQEPEQPGGDGTTSGTTGEGSTGGESTGGSSEPSSSSSSTGGGILDWWSSLLGMNGYIVKGIGGFYYVKTPDGIVECKPRGIFRKQKITPVAGDEVTLETENDAAVIAQIEPRKNVFVRPPVANLDVLFLVASTTQPTPSTLVLDKLSAIAVDKGVQPVVVCTKSDLAEADFLANAYAKSTLPFIRIDYESGAGLDEVKQWINSRLCAFCGNSGVGKSTLLNALLPDAARETSAISQKLGRGRHTTREVTIFEAYGGRIADTPGFASLEANRAGFIPKENLEHAFPEFGPYLGQCQFTGCSHRSEKGCAVRAALAEGKLSQTRYDSYCAMYDEVKDVKDWQRPKVMSRCVILSACPVQPEFKRLLRSDDFIIACDAGYRNCERLGCKPDIIVGDFDSAPCPQQNADDIVVLPHVKDDTDTEYAAKLAAQKGFDEVLLLGALGGKRVEHTLANLCTGLGLEQRGIRAALQDERSRITFVLPGESRRYPKEEFFYFSAFPMEGRAEGVYEKGSFYELEDAVLTAGYPLGVSNEYAEGSDCITISTRQGALVVVETIADMELKIFRDTLPQGGAGCTVKAELPLETDIRISDDLPPVGKLVKCFVRPVVLQRQLQPGRLTLEGYLRCTVFYQSEAEKDLCQTEQKLPFTRQLELPELAFTAWTAVVEGQTEYLNTRAADPRRIEVRGAYGLVVTVHTQCKTEVITALADGGIEQQLRTLQGVRSVAVLDKLVTLEGELVFAKPPAAVLDITGNACVAEVKLLAGKAVVKGELRVQCAWRAEGDTALQSQAAALPFQQVIDLEGITEDCHCLCVAEPVGFTLSQAESAAAQLTANVMLHLRAWRSYQLQVAVDAFSTRFVTELTPQPLVTEQLLCTLNDTATATGSGPLPDAGAQLRACFVHYGPQQTVQKGEGWVLAAKAVVTALAENTLGELESYEKTLEVAVPLPITSPEGTVLVSECWLSTENVQCTCAGGTLEATITVRAEGTILGCTTSPVIGSITLGDPLPDTDPEIALRIYYAQAGEEVFAVARRFHVAPAQILAANQLEEELACLPQAQRLLIPVTMELEQAKKRVKELRAIIEKNNRLYYDQDAPELEDFEYDALTRELKELEARFPQLVTATSPTQKVGGTASSKLPKVTHAVKMESLLDAFSFDELRDFDRRVREAGVEPEYVVEIKIDGLSCSLEYENGQLVRASTRGDGVVGEDVTANVRAIRSIPKTLKDAPEFLEVRGEVYMPHEAFQHLCAEQELQGAAPFKNPRNAAAGSLRQKDARITGSRGLSIFVFNVQQIRGKTLTKHSESLDYLKSLGLPVSPRYHVVHDIEDAIAEIENIGQNRAKLDFDMDGAVIKVNDFAQRELMGSTNKFPRWAIAFKYPPEVKETTLRSIEVAVGRTGVLTPTACFDPVFLAGTTVARATLHNEDFIRQFGLCIGDTIQVRKAGDIIPEVIGVTHHAEGAEPYTMPTVCPSCGAPVVHLEDEAALRCVNPECPAQALRNIIHFASRDAMDIEGLGEAVATQLVEKELVHSAADIYTLTREQLLELDKFKEKSADNLLQAITASKQNNLDKLLFGFGIRNIGDKAAALLAEHFGTLQAIREATAEQISEIDGFGGVMAQSVVEFFAKEGTTDLVHRLADAGVNMQWKGEPKGDKLAGKTLVVTGTLETLSRNEAEALIVKNGGKASGSVSKKTAYVVAGAAAGSKLTKAQALGVPVLTEQEFLAMLQDAPAEQETTMDEYYRAVRALPAWLASPLAQLPVQTAVRIQELRLRTGCAVTFTVQGRQCPASALPGCPPKLAAMRLNALQIEEIFHTLCNGSVHTHERELAEGYLTTAAGNRVGVAGQFVQREGQCIALQKVTSLNLRIARSCVIPLPPALDKLLEQHFTGLLVVGEPGSGKTTLLRTIARTLAERQRLVAVIDERGELFPPEGPLPPLERIGGVDKARAVQMALRTLAPQVILLDELGSLEETMALEQGFFSGVDFIASIHAPDAAQAQCRPQVQALLQRGMLRQLVILAGRETPGCILEVCAVMSGLLHGLGLLLLPLCGWLAGDAVQAQTSLHLAALQGTIALLQRIRQEIQYRRADLQSLCRQLCREGLLPQNPGGTLQQLPAPWQLSAEERACFAECFSGIGRAEAAQECERLGYYTARFEDYLQQARRTAQRQAGLPHRLGLAGGMMLALLFWMDIELVFKIAAIGIIVAVLNQLLIRSGREDQAMMTTLAGLVVVLSILVKQISTLFATIRSLFALMSAAVPVLTALLLMAFAGVLLQRYSPAFALLLSLGAAVWLLLRLAQPLRGVLQAMVQLGQRTNAQAFSCLLRSAGILLLADYVRTLCEEAGADTLAWCAGLAGRCLVLAAVWPLLEQIFQTIWGLAGMKKRGLIICGATLGLLCSKTALKAAAAEAAPWQTYLDKAPVQVEQFAADPLGTLVRLFAAEPVQLLRDTMQQYADVLLFLSLAAGLAFLLQDTADRALLELAAAGGCGVLLWQELDKLAAVLCTRMTGWKSYLLGFLPVYSGVLAAGGEWNAGAAANGFLLTVLCFIAQAVTLWLQPLLRSYLAISMACGISSRKSLSEGCALTGRLLRQAIGWAGKAFAALMSIQRVVTVQLDRSASRLGQLLTGSVPIVGQALSNAADAVLAGMQLLKSTLGIAALLSIGAEFAPLYLGLLIHLLFLSCCGWLAGIGGLEYCHKLLQCFAEAVRCMAAVTALFFMLFVVGIALLMLTGGGMQAFQRAAAVFCMACIGAELVSFFAGQSWAGRCIKAAAGLYILAVLLAQLPRLPGNVLTAFSGSTAPAATSTAQPDALETEILTETKAQLEEYCTAQCRQQFGLDASVTVTLEKAGQQVVVKKVVAAFPTGCTAAQKQAALSFLQQTLGTAPTAAEESTPMKKNELLSALRSLQNNKNRTALAVTVGVMAMLLLLLSELLPSGNTQKTAASTVRTAAVSQYQTQLEQQLEELISQLQGAGRTTVMVTLTTGEETIYAVDTQTGDLQQQEKHVLLQDGSALAETTYLPQVCGVAVLCEGGGDVRVAARITELLHSLLDLPTNRICVEQRKCMRALSRNTRRVTALTLAAALVIAVYLNWQYARADITPQTEDDTLMVSAEPVEAEAETAITDALPTEAEAASGVNKNYGEAQLVSVANDSGTRFFEQARLKREKAHDEAMDTLQKSLKSSSLTAEEKKEYTAQMAAGLEDLNVENEIETLVRAKGFADCLCFLQAGRADLTVMTAGEPLTAAQVAQIRDVVMNKSSVTAQNITVVEVKMRISRRRRRSFSCRQKAVCAAGMPFYADFHLLFQTSIEITPALMVMDLQNMDLQGGSLQISTEVVGKIARCAALEVDGVAEVSCGVQNKKLKSLLESASIQPPVVVEMRDGTASITLHLMMQFGARIPSVAEKVQENVKSAVQNMTNVTVSRVDLVIAGLAEAQMENILPRREARENAFLLAFSQTFGDIPLAEALSNHAENDEEHPVDAFSRLLLNAYYDHSAEVDDEIRSHLRNWTMERLPRVSLTVLRLAVAEMLFGGENKPGVAINEAVELTKKYGAGEDYQFVNGLLGAVARDHGLSDEAVAESAEQMSRYTLGVDTSNYATSLAVFDTAGEVVCAKKRFLPVKAGQLGLRQSDALFHHTAALPEMLQELAQEFDLTKIDAVGVSQKPRPVEGSYMPCFLAGVSAATAFAAARDIPLIHTTHQQGHAAAALYAAKGEALFSQKVLLFHISGGTTDLLLCDQVRAITTLGTSTDLYAGQAVDRVGVRLGFGFPAGAEVSRLAAQCAEDIRPKSSVKGLQCSLSGLENQCNALLAAGKAPEYVCKYCLLCVADTVVRMTKAAQKEYPGLPVVCAGGVMSSDIIRTWVQQRLPQVYFVPGQYSSDNAIGVSILAAREAGLWLMMADVISVSDLNHYVKTLLDVNDGLFDLALRGEIANFVQNARSGHCYFSLRDDACSVKAVMFRTDARRLAFRPEEGMRVVVRCRATLYERDGAFQVYVNEMFPDGLGAAQLALEQLKARLEKEGLFDPVYKKPLPAYPECIGVVTSKTGAALQDIRNVISRRWPSVRLLLCPVTVQGFEAARQIAAAIRTLDQSGKVDEIIVARGGGSREDLWVFNAEE

SEQ ID NO: 7 - protein, 875346 aa, Faecalibacterium prausnitzii (residues 583,565-875,346 of 875,346)
  misc_feature (47523)..(47526): Xaa can be any naturally occurring amino acid
  misc_feature (112763)..(112766): Xaa can be any naturally occurring amino acid
  misc_feature (321327)..(321380): Xaa can be any naturally occurring amino acid
  misc_feature (424212)..(424215): Xaa can be any naturally occurring amino acid
  misc_feature (432325)..(432328): Xaa can be any naturally occurring amino acid
  misc_feature (457136)..(457139): Xaa can be any naturally occurring amino acid
  misc_feature (514011)..(514014): Xaa can be any naturally occurring amino acid
  misc_feature (657303)..(657328): Xaa can be any naturally occurring amino acid
  misc_feature (717338)..(717341): Xaa can be any naturally occurring amino acid
  misc_feature (731633)..(731636): Xaa can be any naturally occurring amino acid
  misc_feature (736557)..(736560): Xaa can be any naturally occurring amino acid
  misc_feature (751491)..(751494): Xaa can be any naturally occurring amino acid
  misc_feature (752675)..(752733): Xaa can be any naturally occurring amino acid
  misc_feature (783377)..(783382): Xaa can be any naturally occurring amino acid
  misc_feature (831597)..(831600): Xaa can be any naturally occurring amino acid
  misc_feature (833888)..(833891): Xaa can be any naturally occurring amino acid
  misc_feature (874884)..(874961): Xaa can be any naturally occurring amino acid
IARAAFRCKTPLISAIGHEIDYTILDFVADQRAPTPSAAAELAVPDREEQQRIFENIEENIHKNIQKRLVLCYNGLEQYNFLLEQSAPSKILQQYSNRLQQIQQAIRTQQKARMNDKSMQLQHAAALAASLDPYRVLARGYALVTDTKGKVCTVEQLQPEQLICVRSRQYQARCRVETVEEINESTQKLMRAPKSFEEGMDRLNAILAQMQQEDTSLADSVKLYAEAASLMQYCHATLEKTSLQIEEISAKIAETVDTPQEQEEEMEYKAQYQEYLRQATAALDAASARFLPEESEVCRAARYSLLGGGKRIRAILTLSVCDMLGGEMQVAAQFAAAVEMLHCYSLIHDDLPCMDNDDLRRGRPSCHKAFSESTAMLAGDVLLTEAFEVIANASATPQICVAAARALGAGAGSRGMVYGQELDLKYEALAATEEQLRLIHRNKTGALINAAVQMGAAAAGATPQQCKILASYAYGLGLVFQIVDDVLDVTSTPEQLGKPIGSDSENGKTTFVTLYGTDGAMVLAQKLNEQICNDLQQHFGAKAAFLQQLAQQLLVRKNMQFIQNILSANQILTASLLSWFIAQVLKTIINFILLGKFQLERMWGDGGMPSAHSATVCAMAIVTGRSAGVSSPIFAVACVVAIITMHDAMGVRHETGEQAKVLNQMIAQWIDVSEKNAPFLQNMHLKEMVGHTPLQVVAGVLLGSLVGFLFPVVMESLLLDKIDQPSDLKKLNAQQVEKLCAEIRHFLLENISKTGGHLASNLGTVELTVALHRVLETPKDKIVFDVGHQCYTHKLLTGRRKQFDHLRQLDGISGFPNPHESVHDAFIAGHGNTALSLAIGMAWAKKIKHEPGLVVAVIGDGAFTGGMVYEGMNNIGGLDNLLVILNDNKMSISKNVGALARYLTHLRTTTAYYDAKDNVRSFLDGVPLIGTPMKKSLIGAKTLVRRAMYHSTMFEDMGFEYIGPVDGHNVEELERTLRSIYQRPGPHFLHIVTKKGKGYQPAEMNPGNYHGVSAFDPDGMPDPEVAPKESFSTVFGKLLVQEGTQNPKLCAITAAMKYGTGLQFFAHRHPQRFFDVGMAEQHAVTFAAGLASQGMLPVVCIYSTFLQRSYDQIIHDVNLLKENVVFAIDRAGFVPADGETHQGIYDAAFLSQIGIPVYAPSNYEELQYWLHYLLQDTVSGPRAIRYPRGGESAKLAQYPCTKREYDFLYETPGAEILLVSYADELEDILEAANQLNAASQNADVLRLVKLYPFTDKLIDTVSKYKIVLFAEECVAAGGIGEHLAYALQQKGWNGRFLHCAVHTACLPHATVPQIKQCTGLDAADLVQAVRSALTKGENELMKIRLDQYLVQNGLVQSRERAKALIMAGVVFVNQQKVDKAGEMIKEDAVVEVRGHDIGYVSRGGLKLEKAMKCFPLTPNGKVCMDIGASTGGFTDCMLQNGAVKVYAVDVGYGQLAWSLRTDARVVNMERTNIRYVTPEDLAEPIEFFSVDVSFISLHHIFPVAQRITTPDAMGVCLVKPQFEAGREKVGKNGVVRDPAVHREVLHNAMSYAAENGFVVRGLDYSPVKGPEGNIEYLMFVQKSDQPAVLDDEAAAQVVAASHTTLDRMTIYISPNPGKTSASEIALRAAQILLTHGAAVLMSDALRESCNTAGVIYLPLERCLKRADVILTIGGDGTILHEANLSLRYAKPILGINLGRCGFLATCEIGEMETKLAAVARGDFQLDNRMLLYARVLGQDGWEGHALNDVVVTKGRLQQAIDFSIYCDDILVEHYRGDGVIVATPTGSTAYSLAAGGPILDSQTKGVVVTPICPHSLASPAMVFAQERKLNVCVGQVADDEVFISCDGGTGYPLKAGATAEIRLSDQNVKLITFGRADQFQAIDQKLRKRQMARSRKEDTKTKAERLQTILRLVQEHPISRQEVLLEHLRNEGFEVTQATVSRDIRELCLVKAATTEGYRYVSSRNESFNPKTQGRFETIFHESVLGVDYAGHVVLVKCYSGMANAACEVFDALQWKNVVGTLSGDDTFLIVARSERDAKTICSELTRYVGQRMLSSLQIENVAVIQKAEVHFEPGLNVLTGETGAGKSILIDSINAILGNRTSKDLVRTGAAKAVIRAAFEQVPPAVLDKLEQSGYERSEALLLSREITAEGKSSCRINGMPATAAVLRELCGGLININGQHDSVGLLNPAHHLGILDDYAQNRTVFQEYYALYRELVRVKRELDALITDEAEKQRKIDLLQYQVQEIEDAGLTAGEEQALENRRKVLSNASAIRDRLAQSYALLSGSDDAAGAVDLLGEASNAVDAAAQLDPALTAAAGQLLDLYYNAKDVAADLIGRLDTYDTNDAELDEVEQRLDLLYRLKRKYGSTVEDVIAFGQKAREELDNIQHSQQRYDALQAEKLRLYTKAREKAEVLTQTRLKAFEELNTRISGTLDFLNMPGVRMTLRHTRGPLASHGQDSVEFYISTNPGEAPKPLAKIASGGELSRITLAIKNAMADKDAVPTVIYDEIDSGVSGKAAGRIGEVLRQSAQGHQILCITHTAQIAALADCHLLIQKNVSNERTYTEIHPLDENGRVEALARLISGDHVTELSRANAREMLQERKHGGMGQRKQKTPSAKNEFGRGRYNFAVPPLFAVSSRKRPYECAPQSRATLLRLMTLYEELKARGLVAQITDEEIIDLINNGKATFYIGFDCTADSLTAGHFLALTLMKRLQLAGNKPIALIGGGTTMIGDPSGRTDMRKMLTKDDIAHNAACFKKQMEKFIDFSEGKALMLNNADWLLDLNYVELLREVGACFSVNNMLRAECYKQRMEKGLSFLEFNYMIMQSYDFYYMFQHYGCNMQFGGDDQWSNMLGGTELIRRKLGKDAYAMTVTLLTDSQGKKMGKTAGNAVWLDPNKTSPFEFYQYWRNVGDADVMKCIRMLTFLPLEQIDEMSTWQDQRLNEAKEILAYEMTSMVHGKEEAEKAQNAARALFSGNAMDTEHMPSTQLTEADLTDGAIGILTLMVKAGLAASNGEARRLVVQGGVLADGEKVAAPTVSFTAEQLAKGIVIKKGKKIYHKVTLMKEPATLMHSIRQRLLAHFEKSALFAPDDPAMEAAPADSGQLLYAPVSGRIRALTRIKDPVFSSEVLGKGCAIEPSCGEVVAPADGIVKKIAKTHHAISLLCDNGMEVLIHVGMDTVELKGKGYELFVQTGDHVQKGQLLFRFDMQAIAAAGYTLTTPVIVTNSSRFARIEPLLSGRVTAGQQLLRAKMMYGVSKINIETDLMMISVQDVVFRGNSLSRYLDIFAETGVVVDMISQSAPHGTTIDFSFTASSSDLPLVMKAISAANLDKDAKASPLISVGYSKLNLFGEDMVTSCGVAARALNALAMAGIEVLLITTSDLDISLLVHAENEDAAYEALKKAYELMKQEPLKRRRPAARKRGQKQTLQAVVLSVLAVSVIALCLGIWTRLPGEDVPVGGVEPPEDVLSPASSIATPEPEPEPQPVVETIRFSATGDNLIHSPIYNQAARRAGEDGKYSFDYCYEHIAPFYAEQDVNWINQETLCSDTLAPSTYPCFSTPGDCARALYRAGVRVFSLSNNHTYDKGASGIAATQQFWESMPEDVVTTGLWCGEEDYDRIPLQTVNGVTIAYLSYTEHTNGIRQNKNMTANVIYTSQTNVIEHQVRLARQQADFVVVGVHWGVENSHAVVDSQRTLAQNLADWGADVIVGTHPHVLQDAQWLTAADGRRSFVAFSLGNFLSTQSHPDQLVGAILTLQLQKTTQPNGSVQCEVLAPQLHPTVTHYDAGKTNVRTYLLRDYTQELAAAHGVRANYSDFSLDRIQKIAQNNISASFLALTMTEIVIQGIGGRMGHVLCDMIAQREDCCVVAGIDMKDGEQNGIPVYDSLEKLNGKGDVIIDFSSPAAVEKALPYCQTHKLPIVVCTTGLSEELQLKVVQLSRSVPVFKSANMSMGINVLAELCKRASAVLGINYDIEIVEQHHHNKLDAPSGTALMLADAINEENNGAYHYVYDRSSVRQKRDPKEIGISSVRGGSIVGDHEVLFCGPDEVITLRHTAYSRSIFANGAVNAAVYLAKKEPGLYDMGDLIAALMKKPVFTGAGVAIITPMYEDGSINFDELGRIIEDQIARHTDAIIICGTTGECSTMTDEEQLAAIKFTVDTVNHRVPVIAGAGSNDTDHGCALAAKSAACGADALLMVTPYYNKTSQAGLVAHFTAMAEAGGIPVILYNVPSRTGLNIAPETALELSKHPLINGIKEASGNISQVARVAALCGDALNIYSGNDDQVVPLLALGGKGVISVVSNVAPELVHNCCQAFFDRDTAKACALQLEMLPLEEALFCEVNPIPVKYAMNVLGWNAGECRLPLVEPSDAHKAKIEQALQAAGLIKEMDRQYKVGIVGATGMVGQRFVTLLENHPWFKLTVLAASGRSAGKSYEYAVGSRWAMTTPMPESVKKMTVLDASKVEEVASQVDFVFCAVNMPKDEIKALEEAYAKAECPVVSNNSAHRFTPDVPMVVPEINADHIEIIPAQRKRLGTKRGFIAVKSNCSLQSYVPALHPLMKDFGVSKALVCTYQAISGAGKTFDRMPEIVDNVIPYIGGEEEKSEREPLKLWGHIEGDQIVNAEKPVITAQCFRVPVSDGHTAAVFVSFDKKPTKEQMLEAWANFRGPAQELNLPSAPKQFLHYFTEPDRPQPKLDRNTENGMAVCIGRLREDTLFDYKFACMSHNTLRGAAGGAVLLAELLAAKGYMDMHSMLKKDFWYDLPKELIAQEPASPRDAARLMVLSQKDDSIQHKVFRDLPEFLEPGDLLVVNNSKVLPARIVGVKQPTGAVCELLLLRQVKGDQWECLAKPGKRMQPGTKVSFGDGSLTAVVDETMEDGNKYVTFYYDTETLYEKLDEFGKMPLPPYITKQLEDQSQYQTVYAKELGSAAAPTAGLHFTPELMDTIRAMGVGIAEVTLHVGLGTFRPVQEDEISDHKMHSEWYSISEETARRIRETKAAGHRVIAVGTTSCRTLEAAAAKYGEIKACSGNTSIFLYPGVKFNCIDGLITNFHLPESTLIMLVSALYGYEKTMHAYEVAVAEKYRFFSFGDAMLIVMPSLTTYTLLKQEHNARRGEFKTVHGTVQTPAFQNVATAGAIKGGLSAQDLKDIGAQVMLCNTYHLHLRPGDKLVADMGGLHKFTRWNGPILTDSGGFQVFSLAKLRKITEEGVTFASHLDGHRIFMGPEESMQIQANLGSTIAMAFDECVENPAQHDYSKDSCERTTRWLKRCKAEMARLKHEGISVNPDQLLFGINQGCTYADLRVEHMKQIAELELDGYAIGGLAVGEPTEVMYEMISQVEPHMPKDKIRYLMGVGTPGNIIEAVARGVDLFDCVMPSRNARHGHLNTWSGIINIKNAKYERDERPIDPACGCPVCRNYSRAYIRHLLKADEMLGMRLTVMHNLWFYNHLMERIRDELDAGTFTAFHDRYVKLLDTRIMQFLTTTSEGYISLFFTLALMLVLLYFMIYRPQKKQEKKDAAMRSSLEIGDQVTTIGGVIGRVVAIKDDTFVLETGADRVKIRFTKSAISSVEKLNMDKAPADKKMSESRGFPAELLSFLLFGVLGVAVTAAALACFAQLMAGQGCSGSVVPILATTAVCMGSLLCALTAAFRKKARGLLTGLLQSTFLAVPLALSAIWNGTAAEPAVVCRLLAVLLCGCIGGLLGVTLRSRRHTLRMWIYEQTKSEENFSLLPQTVGLPVQTAESALSPAPAQAAEPAEQLTQKEPCIPAKRHATQDCWLLAAAFLLGCTAAGVLQAVCDARQAELLRYYLEAWQGLFTPSGMQGAVQLFGMEYLTLGLVVSLFLSLGLSALGPVMIFGNMMLYGLGSGLLMVQLCAAGGWKAILPALLWTGLPAAAASGCLCFFGACALQVSSRIHAYSFRKHPGGQARPGVQALLGQYLLTMVVLLPLCGAAAGLSYLGSRLMKLKSVYVCSNCGETSPRWMGRCPSCGSWNTMNEDVVAEAPKAGTPAARQAAAARQEGVTTLTARRLSEISTTEEKSRILTGISELDRVLGGGIVLGGVVLLSGEPGVGKSTMLLQLCGAISNQHSVLYITGEESVRQVKLRAARLKVPQDNIFLAAENDVDEICGLIEKEKPDLVVIDSIQTMRCMDISSSSGTVSQVKESAARLLAVAKKQEIPMFIVGHVNKDGAIAGPKVMEHIVDTVLYFEGDKMLPYRILRAAKNRYGSTNELGMFDMTGTGLAEIENPSQMLLEGRPLGVSGNCVACTMEGSRPILSEIQALATKTNFPAPRRACSGYDYNRMNLLIAVLEKRAGYFFGNLDVYVNIVGGIALRDTACDLAVCLSMVSSLLDRPVSDKLIAIGEVGLGGEVRSVPNLEQRLHEAERIGFERAVIPKHSLAHLNAADYPGMKLVGAAYIADAINALKNDCLMSIYLDERNPGKHAPFEDAAPDIVEYVRYLEVIAGKSANTAFSYYCDLRSFSRFMKRRRGLVATDAEFKEIDPKGLDTAFWGSITKEDIYEYLYFLNRECGNKKSSTARRLASLHGFYDYLVNQVNRLSEDPTAAIRPPKQDKVLPKYLTAEQSISLLESTQTQSDFPERDYCMVVLFLNCGMRLAELVGMNLGDIDLEQRQIRLFGKGHKERMVYLNDACVEALQLYLRKRNTMEGLSPKEKAVFITRMRKERISNRRVEQLISGAMKAAGLKGFSTHKLRHTAATLMYQTGNVDILTLKQLLGHSSVGTTQIYTHLQEFQVRSAIEENPLGKVLPIKAAKASLDTTDAAGETSVENDPAGEDASEPSGPMAAFEGVAQDGFRADISAMSNDEIDDSSCDTMKNAHFPDFWRSSLSWLIFGLSSAVLHILQFLSYFMILFVSCVQMLPVLCAAASVHLMPTSQRRPVNKHSKRKTHRCKTRNRFLHGLLFVFAALMLCFGLFLWRAALELNAPAESAVSVSAEDFRPVVGDPPYRVAVDAGHGGSDPGARGVVEEKQVTAATAAALLQWLEEDSNYIPLQTRESFDATATPAQRAAAANAQSPQLLLSIHGNSAANGSTAAGFECYPAVPGRTWHQESFYFAKLLAGGMQSIGARLRGRGGVRYIYYLENDQKQLVENTYTQVRPERSFTLLEDVDCPAVLAEQCFVTNDEDVEHFGSEQGCKAVARIYYEAICAYFGTEPLPVKMETSYLKTLELDKIIARAAEGCVCKEARAMLLAIEPQCDPDEVRYALEQTNAINTLLIKNGSPRFGGVEGVSQLAARAVKGGVLSMGELLMVAGALRNFQHLTSWYGSSEHDALPTDDLFYALAPEPGLEQQISSAILAPDAMADTASRTLAELRKKIRATENSIRDRLESMVRNMDTSKYLQESVVSMRNGRYVVPVKSEYRGEVSGIIHDVSSTGATVFVEPQAVVEANARILQYRAQEAQEIERILVAFTAQVAAIEPQFQYSYKAMLEIDILLAKARLALELKAFKPAVRTDSSFNLIRARHPLIDPQKCVPVDIALGGEYDSLIITGPNTGGKTVTLKTAGLLCAMAQCGFLIPADERSEICVFDEFLVDIGDEQSIEQSLSTFSGHMKKITGILELAMPHTLVLLDELGAGTDPAEGAALAVAIIEELRRRGVLLMATTHYAELKVFALETKGVVNASCEFDLETLRPTYKLSVGVPGKSNAFLISEKLGIPSRVIEAAQQHLSAEDKRLDAVLGQLDDLKLQLKESQNEVEQLRNEASHQLEAARKKRDELIQQGENELEAARAKARTLAQQVETQAYALTDELRQLQKDERMSAQQKAQRAREIAKKETEKLFAGTEVVHNPVKEFVPLKEVKVGQEVCIAELNQLATVLALPDKNGDVLVRAGIIKTKVPLKGLKQPEKLVKEPTAPKTKAQQRYSRLTGDTNRPNGRVERVQRTAKMECNLLGLTVDEALSEVDSFIDRAILNGQTVIYLIHGNGTGALRTAIHKHLRGNRMVKSFRLGRYGEGESGVTVVELKMEPFVTMGLVLKETRYREADRILTILTPKLGVITAMAANSLRLKSKLFSACGLFCYSEFTLVPGRNMYTVREADVQNIFHGISSSIEGVSLAMYLTELAAALSPTGEEAARELRLVLNSLYMINEHRTDLRVIKAVFELRTMSECGFMPQIVCCRDCGTYDEGDAFYLDAQEGHLLCASCAAKAGKNCNLDKAALFALRHICLVEDKKIFAFKISVGSLAKLSAVAENYALTHLDKPLKSYAFLKSVLPMSTTIPVQEHYDTSSVFVAVIGRPNVGKSSLTNLLVGEKVAIVTSKPQTTRTRITGVITRGPLQYVLLDTPGVHKAHNKLGKRMDKTASDSIADVDVSMMLFEPYGALNESEMALVEALHRSGPAIAVINKTDLVKEPADLETRKAELKALGVFDEIYTISVRNKEGSEELFDALSRYAVEGPHYFDDDAYTDMPEKELVAEVIREKALLFMRDEIPHGIAVVVERFKERPGTDLIDIDVNIYCERESHKGMVIGKGGAMLKKIASAARADCEEFLGCRVNLQCWVKVKSDWRDNEFLLNNFGFKQNSSNRMSNKVLITNSQKAVKVPSGLRILIRRACNAVLEYEHFDRPAEISVTFVDNAAIAELNNQYRNKPMPTDVLSFPLGENGKYDIDENNGCMMLGDIVISMERAMEQANLYGHPLQREVAFLTVHSMLHLLGYDHENGGLEAMRMREKEEAVLLQLGLPRTVSYTEMAEKCIELDSVEIAAAVFGNCDRNIRLLEKEFSVTAVCRGTQLRISGEPANVAAANRAVEGMLLLIENRTPLEDQTVHYCISLAHDGAEKRVKELTEDFVTVTVKGRPIRPKTLGQKEYLSAIRSNAITFGVGPAGTGKTYLAVAMAVKAFKAKEVSRIILTRPAVEAGEKLGFLPGDLQQKVDPYLRPLYDGLFDMLGAETYERLVEKQIIEVAPLAYMRGRTLDDSFIILDEAQNTTPEQMKMFLTRMGVGSKVVVTGDVTQIDLPGSTRSGLVDALKVLKDVNGIAQCYFTDKDVVRHRLVQEIVKAYERAAHPAADAENKENNKNFKMDSIGRLYIVSRYIALKVYRLPIYFVKRFLKKVIKKLMENLALTESTYYILLSLYHPQHGYGIMQQTEQLSGGRVHLAAGTLYGALTSLCEKGWIRPLPAESGSRKKEYQLTAEGVQILKHELARLQQLVANGESILKEEALMKEKKTVFKLFFVWDFEKEERWLNEMAQEGWVLDNTGFSFYTFVRCEPGEYIIRLEMNPSSDYRAFVKELGAEYIGGCVNWVYFRRKAELGSFELLSDIDSRLTHLSRINRMLSLICLANLILGITNSLNQARYGWLNLLCAAMLSYALGRIHGMKAALEKERSLHEMEQLFLMPGEERYERFKDGNGVPKVHYSYRSMRGAFFDCESRSLEEAQRLCENWLVGQDRCYRNMKKDALIIVRGGGDLATGTIHRLCSAGLRVLVLETTQPAAIRRQVALCEAVYEGEATVEGLRAVRIEALEQAQSVWAQGAVPVLVDQEGACIARAKPEVVVDAILAKRNLGTSRDMAPLTIALGPGFVAGQDVDAVVETKRGHRLGRIIREGSAIPNTGIPGVIGGYGAERVIHAQAAGVFMNVRKIGDLVEKGETIATIRTPEGAEIPVTTQIPGILRGLLRSGYPVTPGFKIADIDPRREELSNCFLISDKSRCIAGSVLELVCAQVWQMNRQTLADVLQSTNQTGSYTLATVLEGAEAGSQLLLRDGDALWQTQSAELLQRQLAVLQACTATGFLTLEGQRVFAERFGAVPQLVVCGGGHVAAALVKQAKLLGIPVLAIDDREEFAQQLRAAGADTVLCAPFAQALQGVPGGAETYFAVLTRSHVFDLDCLTRILQKPAAYVGMMGSRGRAALVRRQLLENGLDSQRIDALCAPIGLAIGAQTAAEIALSILAQIVQVKNARPQTEGYPVALLDAMVQAEKAHTPAVLATIIARHGSTPRDVGAKMLVLPDGSIVGSVGGGIMEHYTVQAAQKLLAQAVPALQCLQLSADGKNEDTAIAACGGSMEVLLQTLFSGEEIKMRVKRSYIVLSFRTTLEAMEWEKQCNARQVPGRLIPLPREISAGCGLAWRMLPEDWQSWQAELDQTQFDKVTPVEQMIYLDNAATTLHKPPQVEQAILEALHTAGNPGRGAHEPTLHAARIVLDTRLALAELFHVPDPSCIFFAANATMALNTVLNGVLHPGDHVITTVCEHNSVLRPLYRLRAQGVEVSFTGVDAAAQLCYDQWETLLRPTTLALVVTGASNVTGNGIDLARAADFAHQHGLLLIVDAAQTAGAQPIDVQQLGIDALCFTGHKALLGPQGTGGAYVRPSLRVAPLLVGGSGVHSFDETHPLQMPTALEAGTLNVHGLAGLCAGVRWLLEQGVENLAAREAALARLFYEQVRTAPGVTVYGDMAMQSRAPIVALNIAQEDSARVADILWEDYGICVRAGAHCAPLMHKALGTAEQGVVRFSFSHFNTEQEVQQAAQAVCALAREILCEMAEFIKVDALGDACPLPVVKAKKAISELQGAGQVEVLVDNEIAVQNLTKMAQQKGYQYSAEKLEERKYRVLFTLGEVVSAPAEDAPVCTPDARTDTVVAISAAVMGDGSEELGKTLLKAFVFALTQQDKLPKTILFYNGGAALTCEGSAMLEDLKALEAQGVEILTCGTCLNFYGLTEKLAVGSVTNMYTIAEKLTQAGNVVKPMSKEDKIVFCTGGGCTAKLGAGVLSRILEKLPRGEKDPDLLVGYDSRDDAAVYRITDNIALVQTVDFFPPMVDDPYTFGQIAATNALSDVYAMGGEVKTALNLVCFPEDMDLNVLGEILRGGAEKVAEAGGSLAGGHSIADSGVKYGLSVTGLVDPHRMYTNDTGMPGDKLVLTKALGVGLLCTANRVGEAAPEVMEAAIRSMTTLNKTAAEISRKYRVHAATDVTGFSFLGHLHEMMGGKLSCVIHANAVPVLPGAEKAADAFLYTAAGQRNRNHTGPFVRFKNVSFAMEEVLFDPQTSGGLLFAVDPADAATLEQELRAAGLSASIVGEILPKQKIEITVTDKMLNEKELPFLAEKGHIVSLVGGGGKTTLLYAMADHCARKGWQVLVATTTHIRQPAACYAPDDAALTALWQAGHYAVIGTPAENGKLTLPQPQLLRRMAQADAVFIEADGAKRYPCKVPAAHEPVLLPQSDIVLALAGLSALDRPLREVCFRYDTIRPQFLAAAPDAPLTPPVLAQLLASTQGGRKAVGDRQFYAVLNQADTPELQQQGIQIQQLLRQHGIKCVLTHFEEEERAMKTVNKPFRKKDAMQLVTGQPVYMDDIIPQDCLIVKLLRSPHANAIVRTINTAVAKKVPGIEAIFTWEDVPQDARRYTQAGQTYPEASPYDRLLIDRHVRFVGDVVAIVAGKDEKCVDKALKLIKVDYEVLEAVLDFHTAKDNPILVHPEDNWESLAPVGADNKRNLCAHDECGNGDIDAVLAGCDVVIDHVYHTKACQQAMMETFRTYCSIDTYGRLNVLSSTQIVFHARRNIANALHIPKSMVRVSKPRIGGGFGAKQTAVSEVYPAFVTWMTKKPSKLIFSRVESQTASSPRHEMEMHVRLGATKDGIVKGIDLYTLSNTGAYGEHGPTTVGLSGHKSIPLYGKAEAFRFVSDVVYTNHMSAGAYRGYGATQGLFAVESAVNELAHKLNMDPIALRLKNTVQEGDVMPAYYGAVNTSCALDRCVLKVREMIDWEHKYPARDMGNGKIRAVGMGMAMQGSGISGMDVGSATLKLNDDGFYTLMIGAADMGTGCDTTLAQIAAEVLDCPLDNITVFGADTDSSPYDSGSYASSTTYVTGKATEKCAMKLREQICKLGAELLECPADAVEFDGKVVFESADPTRQKTLSEIAFASQFGHKIPLEFTETHTSPLSPPPYMVGAAEVEVDTETGEVKVLEFDACVDCGTPINPNLTRVQAEGGILQGIGMTLTENITYDRNGYPEENSLFQYKIPARNDIGHIHVEFENSYEPNGPFGAKSIGEVVINTPLPAISDAIYNAIGTRFYELPITPEQIAMAVAAKQMQITLTLNGIRVSEEIAPDMLLIDFVRAHGCKSVKRGCETSNCGLCTVFMDDKPVLSCSVLAARADGHKITTLEGLQEEAAEFGAFIADQGAEQCGFCNPGFIMNALALFREQPYPTEEQVKEYLAGNLCRCSGYEGQLRGIMSFLAWKKQKEGVQMMTIREYKRAESLEEAWQLNQKKPNRILGGMIWLKMETINVGTAIDLSGLGLDTIEENEEGFSIGAMVTLRQLEQHPGLAAYTHGAMREAVRHIVGVQLRNLATVGGSIYSRFGFSDVLTMFLAMDCDVELYKGGILPLQEYAQRPYDRDVLVRLIVKKTPMQLYYQSVRNSQTDIPVLTCAAARMETGDYRIVIGARPLRAVRFELPAEPALAAEQLAAQFAESIKAQIVTGSNMRGSAEYRKHLAGVLTKRAVLELEQRKMQEEKMKKSLTVGCVIMASGLSRRFGANKLLADFCGQPMLCRAFAATATPGIAARIVVTRSEEVQALCRAQGVPVLLHSLPGRNDTVRLGLSALLEQLPELSGCMFLPGDQPLLRRETVEAMTALFCREQPSPAEWQKETEREIFRLGAVAENDPAPLVGSPVLFGSSFFPELLALPENKGGNVLLKKYPAQVRTVCNADSAELLDADTPEVMHQLEALARQKSMKEVKLEEAAYQFEAKMSLRQAIPLGLQHVCAMFVGNLTPLLIITSACGIAGGEFADLQVTLLQSAMFVAGIVTLVQLFTIGPVGGAVPIIMGTSSGFIGVFNSVVGTMGGGVLAYGAIMGASIIGGVFESVLGFFLKPLRKFFPPVVTGTVVLSIGLSLISVGINSFGGGNKAKDFGSVENLLLALFVLVVILFFKHWTTGFLSSSAILIGILAGYVVAFIMGLVLPTTGVTADGVEFTKAWVLNWNKVAQASWFAVPKLMPVKVVFDARAILPVLIMFIVTAVETVGDISGVMEGGMNREPSDKELSGGVICDGLGSTFAALFGVLPNTSFSQNVGLVAMTKVVNRMALASGAVFLILCGLIPKLGALISIMPQAVLGGAAVMMFSSIVVSGIQLITKEKMTPRHLTIVSVALGVGYGMGANSGILAQAPQVFQLICGESGIVPAAFVAILLNVLLPKNDMAEMLVCRRKVRLKDAAFLHIKSHTYFTSYLHFAIIFSLFCKASEPHKPLKPMRQAVLQQRPDVILHTAAISDTGYCAGHPEQAYRANVELSVWLARAAAEIGAKLVAFSSDQVYAGVEQSGPLPETIPLKPANVYGQDKLEMEQRVQALCPGAVLLRATWMYDLPGYRLPIRGNLPLNLLRAAQRGESVRFSVRDFRGITYVRQAVALLEAALTLPGGVYNFGSENAENMVLTARQFAETLGITVDIQEADWARNLAMDCSKLQAHGIVFDTTQAGLTRCLRDYGLLMTHNNYIYIAVMALVSYAIRILPLTLIRKPIKNRFIQSFLYYVPYVTLAVMTFPAIIQATQSPAAGAVALVVGIAAAWFGASLFQVAAGCCAVVFVLEFFIMESKQRLLEPQLVQTGRADQFSRKVFCDGMRDGVPIALGYFAVSFSLGIAARKAGFTPFQGFLVSLLNNASAGEYAAFALIMANATYFEVAVITLIANARYLLMSCALAQRFAPETPFWHRLLIGYDVTDELFGITIARPGSLNPYYTYGAILLAAPAWACGTALGIIAGNLLPLRVVSALSVALYGMFLAIIIPPARKDRIVAVLVVISFALSFLCSYLPGISALSEGTRTILLTVAISGAAAVLFPVRQEENEDDAMQHETVIVLDFGGQYNQLIARRVRENNVYCEIYSYKTDLSVIKAKNPKGIIFTGGPNSVYLEDSPTVDPEIFSWGVPVLGICYGSQLMMHLLGGHVCRAPEREYGKTEVFVNTESKLFTDVQPSTICWMSHNDYIEQAAPGFEITAHTANCPVAAVENAEKGLYAVQFHPEVLHTAEGKKMLRNFVYNVCGCSGDWKMDSFVENNIKALRERIGEGKVLCALSGGVDSSVLAAMLAKAIGKQLTCVFVDHGLLRKNEKEEVCSVFGPGNANGFDINFICVDARDRYFSKLKGVTEPERKRKIIGEEFIRVFEEEAKKIGKVDFLAQGTIYPDVVESGLGGESTVIKSHHNVGGLPDTVDFKELVEPLRNLFKDEVRQAGRELGLPEYLVSRQPFPGPGLGIRIIGEVTPEKVTIVQDADAIWREEIAKAGLDKEISQYYAALTNMHSVGVMGDERTYDYAVALRAVTTTDFMTAESYDMPWDVLGTVTSRIVNEVKHVNRVFYDCTGKPPATIELEMPFDYKKEYKEFYLPPKKPQIITVPAMNFVAVQGKGDPNDPAGEYKAALELLYGIAFTIKMSYKGSHKMDGYFEYVVPPLEGLWHQPSAEGVDFSNKETFIWTSMIRLPEFVTRAEFDWAVQEATTKKKKDFSKVEFFTYDEGLCVQCMHIGSYDTEPETLRQMDAFAAEQGYCPDFSDTRFHHEIYLGDPRRTAPEKLKTVLRHPIRRMKMKYSWIDTELLQKPGVTKDLQAEWNWIRYHIGGKMFAAVCLDDATGKPVYITCKLDPAEGDFLRRQYEDIIPGYYMNKVHWNSVKAEGNVPDALLREMLEKSYRLVLGGFSKKKQRELLEGEKKDAIMEKQIKTIGVLTSGGDAPGMNAAVRAVVRTGLHKGFRMIGIQRGYNGLLNGECFEMNLRSVSNIISAGGTILYTARCLEFKTKEGQDKGAEKCRELGIDALVVIGGDGSYRGARALAHRGIPMIGLPGTIDNDIGCTDYTIGYDTAMNTALEMIDKLRDTTQSHDRCSVVEVMGRNAGYIALNVAIASGAMAVLLPEKEFDMQRDILDKIAETQKTGKRHFIIIVAEGVGHAQEIANEIQARTGIDSRATILGHVQRGGSPTLRDRVNASAMGYQAVCLLEQGKYNRIVGMKGEKLVDYPVDEALEMTKSLDPVLVDVCNTISIMSEPTANTRSFAHLHIHTEYSLLDGACRIDQLMERVKECGQTAIACTDHGVMYGCVQFYKAAKKAGIKPIIGCEVYVATRTRFDKVNKIDGNNHLILLCKNETGYKNLIKMVSAGFVEGFYSKPRVDKQLLEQYHEGLICLSACLAGEIPQAILAGDYERAKATALWYRDLFGAENYYIELQDHGLKEDSTVLPQLIKLSRETGIPMAATNDAHYLRKEDAKMQSILLCIQTGKTIQDADRMEFQTDEFYVKTTDEMYELFSMVPEACANTAKIAEQCNFDFEFGHTKIPYYKAPDGMDNQAYFEKLCWDGLERRYGPDVPQANIDRLKYEIGVVKTMGYTNYYLIVWDYINFAKSQGIPVGPGRGSGAGSIAAYCVGITDIDPIRYNLIFERFLNPERVSMPDFDVDFCYERRQEVIDYVNRKYGADHVAQIVTFGTMAARNAIRDVGRVMGIPYQQVDVVAKLVPMELKMTLKRALEVSSELKKLYDTDPQVTELIDTALKVEGMPRHASTHAAGVVITPEPTDYYLPLATNDGLPVTQFNMTEIEELGLLKMDFLGLRTLTVIRDAEVAVQKQHPEFSIRDLNYDDPDTYKMLGQGDTEGVFQLESSGMKQVLVGLQPQNLEDVIALISLYRPGPMDSIPIYLRNRHEPDKISYKTPQLAHILDVTNGCIVYQEQVMQIFRELAGFSFGQADNVRRAMSKKKHAVMEAEREHFVHGCTEPGHECPGCVANGIPEQVANQIYDEMSSFASYAFNKSHAACYAYVAFQTAYLKCHYPSQFMAALLTSVLDNTDKVIEYSGECARLGIKVLPPDVNISNGGFTADDNGQIRFGLNAVKNVGRNLIENAVTERREKPYTSLYDFCKRMHGSELNRRAVESLIKAGAFDCFGSNRHSMVEAVEGILKSIETDSRRNLEGQLDLFSVMSGEVQQSPQEDVYEIRPLAEYTPAELLQQEKEVSGLYLSGHPLDAYREKSARIGSHTIKDLTGEDAHVQDGEKVRIVCAVVKNRMMTTKSNSMMAFTSVEDLTGTMEVIVFPKVLDRFRDAIQENAVVVIDGRLSVREDEASKLLADSILPIDSYDPTRLDKGRPDPVKTAARRVFIRLPSRSCPQYAKVVNLLEIFDGDIPVILYLEDTKQKLAAPRRLYTSGHPLFFKELERLLGAENVATKMSFASSAREEIAQRSPTKECCVRAAAYGIACFAKYFDARGLVLQTEQPHTVQLAQQLFARCGIRGEILEKPRVSGVLYEFNIRDAEQVTRLHELFGTTGRETSLQIDPGLIRCQTCVSAYIAMAFLCSGTVTDPQKEYNLEFLTSRTNLARDFEALLAEHEFAPHRTRRNGVNLIYVKTGANVERLLRFMGAADAATQISVLKAFKQVRNQTNRQTNCDTANLGKTARANAQTLKAIRYLQEQHALETLPEVLQQAAAKRLQYPDLSLTALCGCFDPAVSKSGLSHRMKKLEALAENLRQRQQEGQEAVQMELLIVSGLSGAGKSVAMNALEDIGFFCIDNVPAGLLPSITAFSKAGDNQLERVALSMDVRGCRSREQIETALQQLDEQKTPYKILFLDAPDDVLMRRYSETRRRHPISIAEGISTRDAFLKERQILQPLKERANYTINTGLLSTSQNKERICDLFMKNGGAKNAMRLTIMSFGFKFGLPPEADLVLDVRCLPNPFYVPELKHKTGLDQEVVDFVMGHPEAQELLRRYENFLQYALPLYVKEGKSQLTIAVGCTGGKHRSITFARKLAEYCTSLGYEPGVQHRDAVRMEQLKQLLTAAGIAYKENEPLAAHCTFKIGGPARLFVQPIDHAQLCRTVALCKAQGVRYYLLGNGSNILFADEGYDGAVLDISSMQDTAEVHGTQLTAGAGVRLSALCKTALEHSLTGLEFAYGIPGTVGGAVYMNAGAYGGEMKDVLTTVQYLTAEGEVKEAAAAELDLRYRHSIFEENGGCILSAQFALTPGEPEVIRAKMDELMAKRLDKQPLDKPSAGSTFKRPVGAFAAALIDQCGLRGYRHGGAAVSEKHCGFVVNLGGATCADVLALCEEVRTIVKEKTGYDLEKEIRVVRMGTFNVSLKTLTDRVSMEVVYTPRALDEISVEIAEVNRPGLFLAGYYDYFDKLRLQIMGLAEMNFLSGLTAEKRYEALEQLFRQQPPAVIVCRSEELAPFPEMQELAQKHAVALLRSNETTCTLMGSLISVLNLELAPRITRHGVLVEVYGEGILILGDSGIGKSELAIELVKRGHRLVADDAVELRKVSNRQIMGTAPENIRHFIELRGIGIVNVARVYGVGAVKLSESLDLVVQLEAWDPTKNYQRTGLESEYYDILGVSIPSTSIPVSPGRNLAVVLETAAINNRQKKMGYNAAKELLIRLGLDDKMDMPRCAAGILIHIIIKFGGKYNARGAVFVPTAGNRRCIAACAQDFYIFLTLHGFYISAISDFTLFFYTMTIFNVFSLLGGLALFLFGMDIMGKALEKQAGGQLQKILSKLTDNPLKGFFLGLCVTAVIQSSSATTVMVVGFVNSGIMELHQAIGVIMGSNVGTTVTSWILSLSGLQGDSLLVQLLKPTSFSPVLAFIGILLYMCKSEKKKGVGTILIGFAVLMTGMTTMSNAVLPLQNEAWFTSLFTRFSNPLLGVLVGALVTGIIQSSSASVGILQALSATGVITYGSAIPIIMGQNIGTCVTALLSSVGANKNARRAAMVHLYFNIIGVTIFLFGFYGLNAVCHFAFVNTTIEAWGIAIVHSVFNILATVILLPFATGLEKLAILTIPDSPEKEEFALLDDRLLNTPAVAVERARAATAEMAELARVGVVQAMSLTHEWNGELAQKVRDEECRVDRYEDALGTYLVKLSGRELNHTDSQSVNTLLHTISDFERISDHSVNLLESAEEMHQKEIHFSKDAQEELQVLEDAVQDTLSRTTDAFRKGDLHLASKVEPLEAVVNELVRAIKARHVARLQAGSCSIEYGFVLDDLLTNYERVCDHCSNVAVAQIEVAQDSFDTHAYLNDLRHGNDTKESEEFHRRLGRYRERYLFPDGQTAEENMIYIVEDDASIRELEQYALQSNGYEVQGFESAEPFWQAMRAAEPELVILDVMLPGEDGFSILKKLRNTPSLRKLPIIMVTAKSSELDTVRGLDCGADDYIAKPFGIMEFLSRVRVALRRSAPEVRPDVLVFHEIQLDNARHSVTVNSTPVELTYKEYCLLRLLLENTSLVVTRETILQVVWGTDISVESRTVDMHIRTLRKKLGDAGRYICTVRKVGYKLTDEEAEEEMKLRSMEEKISYRLFLMGFLGLIFTAALCIFVFHKAFTAQAWSGLERETDLVRAGYEQTGDPTQLSAFVTDDLRVTLISQDGSVLFESATDQPMENHLTRPEIRDAIANGEGRDIRDSQTMGYETYYYAVRLSGGDVLRVAQDAETVWSIYDATIPAIVLSCVALMLAAAVLAALLTKALVQPVLNMTEDLDHIQENVPYRELIPFAESIHSDRILRENNEKMRQEFTANVSHELKTPLTSISGYAELIETGIAKPEDVPDFGRKIHSEATRMIQLVNDILQLSKLDTVSETGDTPVMETVDLLEVAKECVERQKLNARRAYISLTYLGESAPVLGSRALLDELCQNLCDNAIRYNRPGGKVQIITACNRDGHCSLTVTDNGIGIPREAQASVFERFYRVDKSRSKATGGTGLGLAIVKHIARIHNARIKLESQVDVGTTITVTFPTASMRKQKSCKPLLFLLLAGWCFLFLRCESTEKSMVRAVYLSQTGQGYQAGLLYQAPQAAADAAEASAALQFVQAEGQTMEQALAGAEQALPQTASYRLCDYLLLSKAEEPLLTEYEQLVLRRGCGRTAARLLCAEGETGHLATRAALPDALMAQIKAAAPTAPRLYEHTEPGLLPVLGWNAEEVTIQEGSVLHTVAGDTSLSPEHAEVYRLLTGQGGTRQLWLEGERIGIRRCIVSVTLQKAQVLVRLDCQRAAHSPLPTQAQQQQLAAQCTTLLQSCWQQGVDVLHLQARAALRSGSIAGFDPTKNACPQWRTDVHFMPYMKQQTERFTPAALTLSVVTAALADGIPQSVSVCRALWLGAVSAVCLCILSALAVAMLQNKAPSLAVRLALTAGLFMELVHTLVQAQELCTAEFSSMALLGFLPLLLWAGWAVPPASWNASARVLWWFAAVGGVVCLLGLAGQLHWYRLFTPAQPTVANWGVPVYAEYFAGALLCSARSARRTVWLPAWGFAVQAAALLGSALLFGSGTYPRLELLRAWSSGSFSRMDALLLLLWLLCAVYRASMLCAAIRLLWQQPEAEVQPMQQLSQSLTENLSALDARFGQSADYYAKKIVLYGCPGCIVMFDGMASLDSLWELLLDAAGRQSASVRLTGTQAYAHILHGSAFPAESTPVQDMSQLVARLTAGMAVLLLEGCSSGIVFSVQGLKFRSVEEPSGEGNLRGSREGFTDLLRVNLSLLRRLVRTDTLMQEAAQAHTCCNTEYALCYCKDRADPAMVRRVRAILQSARPELLLDSSYFVPWLLPGKARLFTPVHYTERPAVAAAKLCEGKLVILVNGSPSALVLPALFSEQFECLDDYASTAAFSSFLRVLKYFSFYLTVFLPGAFVCVAVYLPELLPPQLLYKIEAAEKATPLPLFAEMLLVILLLEIIREAGLRMPQSLGHSVSLVSALIIGDAAIATGLMSTPVIFVASITAIAVFVTPGLYEPATLLRIGTVLLAGLAGPVGLAAAFFGFLLSLVSTEALGVPYLAPHPFPQQPLSEDGVLRRNYRQLSRQGFNIWQKRERGKRRSMKLLLCRTIILYLCVLFAMRLMGKRQLGELQPEELVSTILISNLASISIESEDVPITASLIPLFLIAALELLGSVVSFRSQKFFNFLSGRPKTVILDGKIDQNALRMLRLTTADLMEALRGKDIFDPRKVSYAVIETNGTLSAALRPEQEAATLSDLQLKVQQTQATIPFVLDGQVLEDNLRWCGKDRVWLERTATANTVLPQEILLLIGNETEDYFLLKKEGRQPGGKGMKRIYACILIVAALLGVSLYSSGRVQGFAQDISADLDCALEAVRQKDFDTARQALAEGAELCDTMRETMSHLLRTADYTELEAALRAADGYLEQQAAEEALGELRRAQVEVERLEWLARRLVMKCPYCGAEESKVIDSRPTEDNERIRRRRECLNCHMRFTTYEVVETVPLVVIKKDNSREPFDRQKLFNAMLRACAKRPVSYETLERAVSSIEQALFSSYDREIPSVRIGELTMEELKKIDEVAYIRFASVYRQFADVESFLDELKKLVGDRKENQMKTKGKAWQLVVTALLIVVFVYTAFFGVAAKYGDVTTTYIKGAKDIRFGVDIKGGVNVTFVPSDGYDATDEQLDAARLVIENRLVALNVTDYELYVDNNSDSLILEFPWQSGETDFDPESAIQEIGTTAYLTFREGASKDGELILDGSMVESASAQYGAVSNGGSSEYYVALKFTTEGAKAFGDATTKLAADKGSISIWLDDENVSTATVNTAITDGQAIITSSASNPFTQDAVVKMARQINSGALPFALSVDSYSTVSPSLGENSLGAMVLAGLIAFALIVVFMTVLYRLPGFLACIALAGQVAATLAFVSGYFPVFESFTLTLPGIAGIILAIGMGVDANVITAERIKEELKNGKSLDGALKSGFARGLTPIIDGNVTIVIVAIVLMGAFGPSDGLFAKALHFVFFAFGPSTAGTIYAFGYTLLTGVLLNFVFGVFATRVMIRGAAAIKALRNPWLYGAAKPGQEKAEKKPVDFVSLRKKFLTFSACLMAAILLCAAVFGVHLDTEFTGGAMITLSYEGSFDQSAVQKTAAAALENTGLTLQTGENVATGDQTLKISMPGTETVTTEQVENLLDSLNENYPDNQFAQLSLSNVSAAMGTKFLQKSLVAVVFALVLILLYIALRFKNIGGLTGGMMAVLALVNDLMVVFGTFVLLRTALDGNFIAAMLTILGYSINDTVVVYDRIRENRTLMGKKGSFEELVNQSVNQSARRTLITTITTVMALGVMCIVAKLYGLDSIFTFAFPLMMGMISGVYTSLCVSTSAWVLWSERSKKKNMANYHEMDRDALTAEKAALEQAYKEFQAKGLKLNMARGKPGPHQMDLAMDLLKMTDYTTDAGTDARNYGELEGLSEARALFADVFGVKPNEVFVGGNSSLQLMYNLINIGYVFGFPESPCPWSQVEKRKFLCPVPGYDRHFAITEEFGFELISVPMTPNGPDMDVVEKLVAEDDTIKGIWCVPQYSNPDGYTYSDETIERFAKMKTAAPDFKIFWDEAYIVHHLTEEIIETPVLLNVSKKYGTQDRVFMFTSTSKITFPGAGVSAIACSDNSMKYMCKRFSVMIISYDKMNQLRHVRFLKNKEGVLAHMAKHRRRLVPCFDAVKTAFAANLTPCGDIAHWTNPKGGYFISLYVMPGCAKRVAELCKNAGLVLTGAGSAYPYHKDPQDSHLRIAPTYPSLDEVETASELLCVCVRLAVVEKLLADMAMARLLRYAPAREHTPHDPYFTIIVHFPVRNKNLKAKSPAKSKKLSKQGFMANNNSGKNEKDLVCSFCGKHQDEVERMIIGPGVNICSECIGLCHDLLSDKPDQPKSARPARGNANRAHVQPAAADLDINIMTPAEIKEGLDQYVIGQDEAKRVLSVSVYNHYKRILSGKGGDVELQKSNVLLLGPSGVGKTLLAQTLAKMLGVPFAIADATTLTEAGYVGEDVENILLKLIQAADFDVQKAQIGIIYIDEIDKITRKSENPSITRDVGGEGVQQALLKILEGTVSNVPPQGGRKHPQQEFIQIDTTNILFICGGAFDGLDKYILRRTDKSALGFGSALKDNSTEAERALLRKVEPHDLVKFGLIPELIGRLPVITVLDDLDEDALVRVLKEPRNSLVKQYKELLGMDNVELTFTDEALHAIARKTIERKTGARGLRSVMESILLPIMYEVPSDATIIRVTVDEDTVEGGEAHLEYGAVRKRYKNQAALSMSFVPYVVEQSAHGERSYDIFSRLLNDRIIVLSEDVNDTTASLVVAQLLYLEGQDPDKDISLYINSPGGSISAGMAIHDTMQYIKCDVSTICMGMAASMGAFLLASGTKGKRFALPNAEIMIHQPLIGGQGGGLSGQTTDIKIHAEHMVYIRDKMNRMLSEYTGQPLEKIQQDTERDNYLTAQQAKEYGLIDEVIAHRMNLIKCEKLEKSMAELQFSIDAEAFKKAVADVFKKEGKKYPVQGFRKGKAPKALIEKMYGADVFTYDAINELFPEAFEAAAKEAGVEPVGRPEVSVDSASEAEGATLTVKVAVKPEVKVGSYNGLTVEKTVHTVTDEAVDAELKRVQERNARELTREGAAQNGDIADIDFEGFVDGVAFEGGKAEHYNLTLGSGSFIPGFEEQVVGHSAGEEFDVNVTFPTEYQAAELAGKAAVFKIKLHEVKYKELPALDDELAKDCSEYDTLDEFKASIRKNNQEQLDKQDDLAVENALVDQVIESMEGEIPQAMYDVRMDEMVNDFAFRVEQQGLRLEDYLKYMGQSMEQFRAAFMPQAEKQVKIGLALEAVAAAEHIEASEDEINAEIKRIADQYKMEEDKVRELINLEDLKQDLARTKAIDFIKSHANIVEKPAEAEKAADAEMALFVLGDPHLSLGASKPMDIFPGWNDYVDRLEKNWRKLITPQDTIVLAGDISWAMRLTDTRKDFAFLQQLPGQKIIMKGNHDYWWSTANKMNAYLKAEGFDTLHILHNNSYSVEGYAICGTRGWLFDVGEPHDEKVMNREIGRLRMSLQAAEPGLEKLVFLHYPPVYTGTSAPEIVATLKEFGIRTCFYGHLHGNAIRFAVQGEVDGIRYKLVSADGLRFCPYRINMQFFSTRDQNRKVTSSQAIAQGLSDEGGLFVPESFPQVDVKALCGLDYPALAAAVVREYLTDYDPAFLTEATRSTYGAAFGGKAGYLAPVEGDTYALELWHGPTCAFKDYALQLMPKLLVEAKKNLGRTEKTLILVATSGDTGKAALDGYHDIPGVEIAVFYPTGGTSEIQRLQMATQEGANVAVYAVRGNFDDAQTGVKKVFGDKAIAAELEKRNIRLSSANSINWGRLVPQIVYYFAAYAQLLKAGKITFGDEVDFCVPTGNFGDILAGYYAKQMGLPVGKLVCASNENNVLTDFLTTGTYTAKREFFKTTSPSMDILVSSNLERLLYHVTGSDAEVAGFMQQLAATGNYTVRPETLAAIQETFSCGWSSEAEVAGEIRSRYEKDGYLCDTHTAVAFHVAAQKKRQGVPMVVLSTASPFKFPRSVLSALGKAAPENDFEAMQQLEAATGHAAPASLAALRSKPERFDTVIAPAQIAEVALGYQAMNRAETGRRGEAAAARWYQKQGAQLLAHNYHTRMGELDLVLREPDGTIVICEVKTRSQGMLQRPAAAVDPAKQHRLICAAQGYLQQTGQSEEPVRFDVAEVVPLDSGRWMVHIIKGAFLCETMKRRSDEEISAPLYAFDAEVRSQYGCFAGVDEAGRGPLCGPVCVAACILDPENPVYGINDSKKLTEKKREALFDEICEKALAYRIIFVGPEVIDRENILHATMGGMQQAVEELDIVPNLVLVDGNRTPAGLQIPAQPVVKGDATSASIGAASVLAKVSRDRYMLELDKQYPQYQLAKHKGYPTKLHYELIAQYGIQPFYRRSFLKKQGYWPESGKMNEMDTRFANQYNIQWFPGHMTKTLRMMEQEIQHVDASLVLLDARIPLSSLNPEIERITDRKPKLYALNKADLADPAVTEEWIRYFHAADAGCVAISAKQKGGANAVKVAIEKELSGLLERRQNRGMGGAKTQVMLCGIPNVGKSTFINTFAGSARAKAADRPGVTKGKQWVSTEKFDLLDMPGVLWKKFDSKTIASNLAFIGSIKDDILDVEELAMNLLDEVRRNYPDLVAQRYKLDAETLALPPYELLEAIGRKRGLLVRGGEVNTERCAIMLVDEFRACKWGRISLERPPQRDDLTDFAGEDEEMEKQQQSPSAVRGQGMLEWYEALISAALVLVLIFSFFFRIIQVDGRSMVPTLTHGDKLIVWAAGYTPQRGDVVIVDSYTVYGKPLVKRIIAKGGDTISIDYDAGTVTVNGELLQEDYIAAPTYLGYDVQFPFTVPEGTLFVMGDNRNESLDSRSSYVGCIDERDILGKVLLCFMPFTDFGVVKMDALKIISEGSIKAEKPQFNVGDTVRVDVRIKDGDRERIQAFEGTVIAKKHGGVAETFTVRRVAYGVGIERVFPVNSPFVEKVTVVRKGKVRRAKLFYLRGRTGKAAKVKSDIMITVRISFEKKNEASYISLLDLQRVMQRVLKRSGLPVWHTLGFNPHIYMTFACPLSLGQESECECVDVKTEAEAPDFAQWRTALNAIMPAGIHVTRVAPVEMKADSIAFACYRISYPAAAAAVLEQYNALETAPVEKHSKRGKKIVNLKEHIPQLSYTVLGDTVQLELCLPAAQELNLNPSLLTGFLEEKFGLPAASANILRTKFLTADRQLFVMFDPKLKEALGRVQKPGRYTGGEPGSIYKEKDKVDVRFAFCFPDTYEVGMSFLGEKILYELLNSHENWWCERAFMPWLDMKAEMERLQLPLYTMESKDPLTAFDAVGFTLQYELSYTNILAMLDLAGIPFYAKDRDDRWPLIVAGGPCACNAEPIADFFDVIQLGEGENQLPAICAEIEKAKKEGISKKQLLLNIAKIPGVYIPAFYDVTYHEDGRVKAITPNEPGIPARITKAIIKDLNQFAPPTNFVVPMVGAIQDRASIEVLRGCVRGCRFCQAGFLYRPMRQRDASLLNKAAQDLCANTGYEELSLSSLSTSDHGQLEELLDDLNEWAPKEHVSLSLPSLRVDNFSQSLIEKTTKVRKSGLTFAAEAGTQRLRNVINKNVTWDEIEKTCTIAFNAGYTSVKLYFMMGLPTETMEDIEGIAETAQRVVDLYYKNTNHAKGRGVQVTISCACFVPKPHTPFQFVPMDTAETLQAKQKHLLESVHSRKIKVNYHDSTTSFLEGVFAKGDRRLAPVIVEAYKRGCYFDGWEECFKYDTWMQTFADLGIDPAFYCQRPIALDEVTPWSHMDYGITHEYLVREYNKALAAQTTPPCNRACNACGANHLLGGPCFDYSQNLVMNRVRAGKLIFRDPVLLCGMVYLLLYFDASGFLRLGLLAAVLHELGHILVYCIQQRHLPVIEVTMTGFCMRTAGERLSPRQRFVLAVAGPAVNFALAGVWAVRLAQAATIRGSAFWAANLLTGLFNLLPIPPLDGAQMAAYAGALWRQKYGKCTQPAGNDCKTGTFGVKMRAKRSGQAAKIRRRRWGVVALVLAGLALCLLAALPVQAARNTKKYCFPLDTAVWRISDVYGKRIDPFTGKAAFHQGLDLACAAGTAVRAVQDGVVTAAAYSPSYGNHLRILHPDGCETRYAHLQYLYVRPGEVVQAGQTLGTVGQTGRATGAHLHLELWQQGAACDPAALLETAPMSDESIFINRELSWLDFNRRVLALGKDKNVPLGERIKFLAIYGSNLDEFFMVRVGSLQERANLEQSKTKKEKRENKTNMTAAEQLAAIMPKTAQLQEECDKFYAKALENLAENGYHKVDFDHLTKEEEHLWKKYFQSELFPILSPQIVDNRHPFPFLRNKEIYLGVLLKEKHTQEQSLGIVPISSQMERLHFIKKDGAVQFALTEELVLHYASSIFGKDSMQEKCLFRVTRNADIDVKEGMMDHDIDYREIMTELLRRRRKLAAVRLQITPAPAPEVERLLCSRLELTRKRVFLQKSPLDLSFFFKLSGRMEAEGHPALFYTPARPMLPPPDYDLAAEVQKHDVLLSYPYQSIRPFIAMLKKAAQDPDVISIKMTLYRMARESQIVQALMEAAENGKEVVALVELRARFDEQNNIDWSKQLESAGCTVIYGFEDYKVHSKLTLITRKGAEGYSYITQIGTGNYNEKTSELYTDYSFITADERIGEEASKVFRNLAVQQLTEESDKMLVAPLRFKSVLLDEMDHVIAAARMGRPASMILKNNSISDRDIILKLQEASCAGVRIDMIVRGICCVRAEVPGKTENLHIRSLVGRYLEHGRIYSFFDGTHTRIYIASGDFLTRNTECRVEVGVRVEDPVLVQKLTDILQLQLRDNVNARVMDASGNYQKVKPAEGEPLVNSQMGMYELLRNDWQRLEPWKCTTPATETEKTAAVCQEVTVEQLKQELPHVFQPAPEKAEKAAPAAQQPDHYEALEQMLNNKPRAAQPASKAPATPRPAVKPVVTAPKKKSLLERIGSFFRRMQNKKRREELFLLLCLAAAGVCAVLAFRFAVPLQAQTPQTLPDTKELAAYTQVELNTADADALCTLPGVGPHNAQAILDYRAQHGPFAQVEDAAQVPGITQAMVDSWAGQAYVRMNDSLASTLVLCDLDNLLLGEDGNLTQVVRDVLQLFSSRGGRLTVFSQRSPRAVRSILGSVRLAAPALVCGGTMAYHYADGNRVPLCSFAQQQELFACLPDTPGVGVAVQMQDGTTRVLRMSNALERHLRQEWTPYLLANAADIHPEQVLRVLLYQDSKSVPLISLAEKAIGDRVALLGERIAPDTLVLTPKRISGREMLDTVCTMAQVGAEQVLVLAGGQPMLELVQAVEHSAVAADAPAELRLAAGQVTLTDAAGGAAVEVLYRMVRAAEKSVMEQREFIVEQETAGQRIDRFLSGEDTGLSRSALQALVAEGHVQCNGKTVAKSLKLKAGDTVLLEIPDAKPIEAVPQDIPLEIVYEDSHLLVVNKPKGMVVHPAPGNPDGTLVNALLWHCKGSLSGIGGKIRPGIVHRIDKDTSGLLVVAKDDATHIGLSQQMAVHSVERAYQTVVYGGFAQDEGFVEANLGRSKTDRKKMAVYPATEPHTKYAYTGYKVLERLGEFTLLECRLKTGRTHQIRVHMASIHHPVAGDPVYGPHNCITSLHGQCLHAKTLGFVHPITGEQLRFDSELPDYFTHFLATLRRKNTMAFVLFNLAAVAALIGIDQLIKLWAVQVLQPVGAMPFIPHVVELRFVLNPGMAFSLLSGKQLFLIIATSAALLAVAYGLFFRSRGKRLQQAALVLVLGGGIGNLIDRVLNGEVVDYINLLFMRFAVFNFADICVCVGVALWVLVIFLDEVHADDAASKEQMAKNKSQYDSTLNLPKTLFEMRAGLPKKEPVMLKDWDDNDLYNQLMKHNEGKPLFILHDGPPYANGNIHMGTALNKIIKDIIIREKNMEGYQAPYVPGFDTHGLPIELKALSSVGDKKKDISKLELRQICEKFATEHIDIMSDQFKRLGVIGDFEHPYLTLKPEFEARQIEIFGEMAKKGYIYKGLKPVYWCPDCRTALAEAEIEYGEDDCDSIFVRFHVSQDPNGVLAKYGIPMDKTYFVIWTTTTWTLPANEAICLNGQFEYSFVKIGEEYHIMATDLVKSVMDACHIENYEIVGEPVSGAEFELMRYNHVYLPKEGWVILGDHVTLESGSGCVHTAGGHGVDDFNVCQKYPQVPITVPVDDGGYLTELAGKYAGQRVWAANKTILADLTASGAVMGQVHIKHQYPHCWRCHHPIIFRATEQWFCSIAKFREDVYKAIDTVTWMPDWGHDRMTGMVRDRNDWCISRQRTWGVPIPAFYCKKCGAYHITDATIKAVSALFRKEGSDAWYKYDAEQIIPAGEVCEKCGASEWEKDSDIMDVWFDSGSTHAAVLDERPELRFPADMYMEGGDQFRGWFQSSLLTSVASKGCAPYKSVLCHGWVVDEQGKQMHKSAGNGVEPSEIIKDYGADIIRLWVASSDYTVDVRAGKNIFKQLSEAYRKIRNTARFILGNLDGFDPNTDCVADDQLQDIDRWALAALDDLIANTNAGYAVYDFNKVYHAVYNFCVVAMSNFYLDVTKDRLYCTNGTARKAAQTTMYKILVALDKIIAPILCFTSQEIWDFMPKTEGMNKYVVFEQMPKAGQYAADDAFKAKWAQLIAVRDEVKKVLEQARAEKLIGASLEASITLYCSDAVYDLLNSIPMDELADLMIVSHVELVKGEGGAASAVEGLGVAAAHATGDKCERCWKYSASIGSHPAHPTLCARCASVVEAMLTPQDVRSVQFEKNLRGYRTEDVDRFLDKVEEQLQQNDAQAEQLRKQIADLTAENQKLKGELQSFEADGDMLKSALINAQRMGENVIREANQKAEEIIHRANLRGDDIIRDANELLQKASDRADEIENEANEKRLAEEREYDRVRLEVTRFKADVLNLYRSHVESLSRLPEFQKDAKEAEKDAPVQDAEPVQEAAAEQPAAQPETAPAADAAAAPAEQPAEMTETTEPAAPADDDKAADSSEDFWAKDESQLKLDPPPADMKPDEPDYDAFQGVKFSEMAHSIDPATGAVRGFVPARNDEERYLMRHIEDLADAAFSRGIARYSAFLSDREQDLARAALGRAGVRDGWRFDGGWPEAERRVLCLEPEYSYGECPVRCVQLQCRALPGAALPAHKDYLGSLMGLALKREALGDILLPADAPGTAYVFALEPAAKLICRELCQAGRTEVSTRLLEPEEIPAFPAPERQLLTATVSSLRLDAVLSAMLHVSRGTAAELIEAGRVEINHLPVEKPHAPVYEQDVFTVRGKGRFRLTALPGKSKKDRSIIEFFQYMSLLDSIKKGLMGEGDEYEDQYIDDGPQMVNNNSGVGIGMDEETEEPAEGTSKKNKVVNIHATTQLKVVLVKPERFEDASTIADHLNNKRTVVLNLESTNKEVSRRLVDFLSGVAYANNGQIKRVANSTFIITPYNVDIMGDLLDELENNGAFYMTSAEKNQIIVKAICILFAKNARQPGAARMKGADNYVFAGMPETPQEPRHKFSALTTLAAVLATFLLAAAAYVCWQAAHILFPQNVYETALPITISDTIEADGVLLFDETCISGSGNLGYLVSDGERVSAGTAVAELYTDANQAVLRQQLTQLTSQIDLLQRSQNTAATQLDGLLKERSGALYDLLDALDTAQYSDVDESTDAYLLAQNKLWITTGDTAGFADQIALLAQQAQTVQAQLGNPTQIAAPTTGYFVRAASSGRLNAGAADILAQSPEQLKAYLDSDPEMPLDGCVGKLVAGFSWQYAGVCSAKQAEKLLGADGKPLRTAVEISFPGQSDAALRATVSEVTIDAEKDVARFVLQCNSINGDVLCLNHARARISTGESTGLRVPAAAVHYLKEDGTEAEMQGENYIPGVYVKYGNIARFCKIDPVDADHPLISEDDYILVLPKGTDGSVSQVRLYDEIIVSGQNLYDGKLLMVAVVGPTATGKTALGVALAQQFSGEVISADSMQIYKGLDVGTAKVTPQETCGIPHHGVDILTPEKTFSVADFTALAGEYIQDITARGHLPLLVGGTGLYVQSLLYGVRFTAEKAPDGLREQLTAELEANGPEAMYAKLQAVDPEAAAAIHPNNKVRVLRALEHYRATGKRLSEQKADSLPPERPYRSLVLGLDFPDRAALYRRIDLRVDKMLEAGLLAEAEYVWRNREVFRTAAQAIGYKEFFAYFQQTATLEACTEKLKQASRNYAKRQLTWFRHMDGVTWLDAGAADVRQTALRLTQDFLLKGMAVIHVLDKHTAELIAAGEVVERPASVVKELLENSIDAGATQVTVSIESGGVKLIEISDNGTGIDAEYIPTAFIRHATSKIEKPDDLNSIHTLGFRGEALASIASVARVELLTRTVVDEFATCYRIAGGEEQGREPAARAVGTTIRVQDLFYNTPARMKFLKKDSSEGTFVADNVGHVALSHPEVSVKFIREGKLQYVTPGDGQLRSAAYAVLGREFSRDLIEVHSEEGLYRVTGLITPPKSCRASRSMQHFYINGRYVRNRTIMAGMEMAFKGTTMQGKFPGGILLLEMPTDLVDVNVHPAKIEARFARENDVFDVVYHAVKLALAQPGTGERRFTFEADEKEKTEKENDIQSENTVKNNRFTGLSAVIPGQADPGTLPAQRWEAPQPPRPAAAPVKTPSFTADTPPVQPAQPARAAATVPSWRQSGPAEDILDPVVTLHSPEKADATEVQPAAQPFRAAAAETQLDVRPETDAAADPPLDHMAAWNTVPAAPEIEAATVPYQPEEPVQSEQPEQLGFDVPQGEEPLRYVGEVFRTYILAERGDELCLIDKHAAHERQLYEKLAANYGNVPSQLLLQPAAIDLSAEEKQALLENQPLLENAGLDVADFGGSTVLLRAVPADVEPQNAEDLLVEIADRLLKGSRDALNEHTEWVLHSISCRAAIKAGDKSSPQELMALAEKILSGEVPPFCPHGRPCVLKLTRKELEKQFGRIVMAELSPMMQQYLEIKNQHKDEILFYRIGDFYEMFFDDAVTASRELDLTLTGKQCGLAERAPMCGVPFHSYEGYVARLIAKGYKVAICEQVEDPAKAKGLVKRDIIRVVTPGTVIESSMLQDDRNNYIASLYLKGKKAGLCFADVSTGTAHITELTADKIAPAVITELCRYHPSEVLLNPGLLDCREVTAYIKKNMNCSVELVEDERYAPGLVASALEEQFGRDWPQTTGIAAEGLVRFAMAALLEYLHDTQIKGVERLKTVITYNEAQFMRLSPVTRANLELTETLRGREKRGTLLWVLDKTSTAMGKRMLRSWIEQPLISSQLINHRLNAVEALVRQTMVRGDLTEELHYIADLERLMTRTVYGSATPKEIYTLAQTCDRLPGLRKQAEGCNCPELAELAASIDPLEDIKARIYAAVDPDAPSTLKDGGVIAKGYHAEVDELRSIRDNTKGVLAQLEARLRQETGIPKLKIGYNHVFGYFIEVSNSYKNLVPETYIRKQTLTSGERYITQELKELESKILGAHERLISLERRLFDELLESIGAQLDRIQRTANAIAQLDVLAALAQVAAENNYCRPVVDDSDVLTITEGRHPVVEQVLKGSMFVPNDTTLNCTTDRCLIITGPNMAGKSTYMRQNALIALMAQIGSFVPAASCHVGVVDAIFTRIGASDDLAAGQSTFMVEMTEVAEILKNATAKSLVVLDEIGRGTSTFDGMSIARAVVEHIADPAKGLGCKTLFATHYHELTELEGTVEGVKNYNIAVKKRGEDITFLRRIVRGPADDSYGIEVAKLAGLPGSVTRRAHEVLRTLEASAPKNKVEQMDFDALQEYNSPAVPSEMMEKLEAVDVETLTPIEALNFLYELKKTLKGSLNGMDCIDLFKRAAMALQTDPRYVILDQARKANDKDEELQNLIGEFNLARMDLNNEIGKNERDDARIAELNEKVNSLYGQIMGNEGMVAYNEAKRECENLVNYIDAIINTAMNGGDPMTVQEPSASCTGSCSTCGGCHMVFLEYINFEHNTVAAELVRQTYDTPPLAFVHSYGCQQNVNDGERIKGVLVDIGYGLCDRPEDADLILFNTCAVREHAEQRVFGNVGALKGLKEKKPGLIIGLCGCMANQKHVVEKLRKSYPYVDLVFGVDGIDTLPQLIAQKLQKHKRVLLDPAQRPVIVENIPIRRESEFRAWLPIMYGCDNFCTYCIVPYVRGREKSRKPGDILAEFRSLVEAGYKEITLLGQNVNSYGKGLEEQIDFSDLLNLLCTVPGDYHIRFMTSHPKDASHKLIDTIAAQPKLCKHLHLPVQCGSDRLLQQMNRHYTVEQYLELIDYARKTVPGITFSSDIIVGFPGETEEDFVKTLELVRKVGYMQLFTFIYSKRTGTKAAEMPDPTPRKEKTDRMTRLLATQDEIAMALVKAQVGQIVRVLVEGFGRNEGTLSGRLDNNLTVEFAADPALLGSYATVHLTGARATVLLGELEAMRYSKQRELVMQTVQQLCDHPTAEEIYDKAAQECPNLSLGTVYRNLNSLVEAGRVRRVSIPGKADRFDHTLPWHSHLYCTVCGGVTDAEVDGKQVMELVKNQKGRVQDCAVVLLGVCEECCRRQDAEAAAAKQAMNEPLAQRLRPKTLADVCGQQHLLAPGRVFRRTIESGRIPNMIFYGPSGTGKTTVARIIAENSGMTLHKLNGTSCGTGDIKAVLKDIGTLAAAGGILLYLDEIQYLNKKQQQSLLECIEDGSVTLIASTTENPYFYIYNALLSRCTVFEFKPLAAADVERGVRNAVQRLSEGEQVPVCMDEDACAYLAESAGGDLRKALGCLDFAVTAAPVENGEKRITLDMIRQVTRRTAMRYDREGDDHYDIVSAYQKSMRGSDPDAALHYLARLLEAGDLPSACRRLMVCACEDVGLAYPQIIPIVKAAVDAANMVGLPEARLPLADAVILVATSPKSNSAHDAINAAIADVQAGRTGPIPRQLQNKHFDGEDALVKGQNYKYAHSYANHWVQQQYLPDVLKDTKYYTFGDNKTEQAARAYWAKIKGEENVMVVSPFLPARHFLYSIAHLEKEDKGFSENHSQIMPCKHLQILSNMVMSVRKKAPEDLTAKKALALEVIRRLKAEYPDAGCTLDYDHAWQLLVSVRLAAQCTDARVNIVVEELFAKYPSVAALAAAEPEDIEAIVKPCGLGHSKARDISACMRMLRDKYDCRVPNTFEELLALPGVGRKSANLIMGDVFGKPAIVTDTHCIRLCNKIGLVDGIKEPQKVEMALWKIIPPEEGSDLCHRFVMHGRAVCNARKPECEKCCLKDICRTAREAAGQQAEPMITLTILLIVALLCVLVGCLTGLLTLVGVLASLFVGVLVGALAGYLAGRFMGTETSLGRNILMGVLGSFVGEFLFGLLGIHASGSFSSFAISVVGACICIWVGQKISKMIFVPLLHYFLCKNDYSGNEAGLRYRLTPGKRTVPDPDGGADATKEEKILTVDYWPAPWTIDKTDPALRRREVFPLTDEGRAAAAQYLKDAYDAEPERWNNCPDMMDCDPWEPPAEPDTANEMIYRLKELKGDTIAVPQLVFSKLGIAEEYNVRVALYVLATGVTDPDKICADLKLRSRISAESALAFWAGAGLLERYEENAAPGAEPSAPAPMRWAEIAAASRTDPMISSLIDCGQTSFARPLTHTEMEKLVNLYVQEGFAPETVMLCVAYVASRGKRTMAAVTHELKVWRAEGVETGEQADAHLKLLALRQSREEYVSSLLQITPEELTLGGRKAIARWYEVYGYDDAMVQEAAVQAGPKRDLWYWNSILKTWNAKGLRSIHDVRGPVAAAGASRNIRVDRDTPSGNDILKNATRRRSLIKKPEMRTKNELYQQALRTVAMRRQTARALAQDAQAEAEAAIPGLRHAEEEVRVRGIRCAIAGASGKDRTETAAALAAAKQKLTALLAESGRPADALEPKFTCKRCEDTGAVDGHTCDCVRRVMQQLRRKEIEELSSLSVSSFDTMQLDYYPNTVDKALGESVRSYMAEVLADLRDYAADFSPTTRESLLLVGNAGLGKTHAALAIAGEVLRQNYDVIYVSCPDFFGKLEALHFGTDPGGEEEALFQTACNADLLILDDLGTEFNSSFFLTNLYSLLNNRLGAKLPTIVTTNITDGALLEKLYTEKISSRLAAFVQIQFLGSDIRVQKAAEMAEFISLYSGSSGNSSVVRCGAQYLIVDMGKGVRTTTAALKSLGLAISDCAGILVTHEHSDHVKGLSTFLKKNPLPVYGAAATLDFLDANDIVPANCALNALEGREEDIGCFGVQSFPTSHDVPCVGYRIHTPDDKTMTIATDLGTLTPPVHEALSGCDLVALESNYDLHMLRSGPYPYYLRARIESVRGHLSNDECSAKLLELIQSGCKKFALCHLSQENNTPSLALQTVFTTLGAAGVVPEKDCIVQAQRRNEVSPALEFMEKFVITGGKPLHGEVTISGAKNAAVGILPATILAADVCVIENLPDISDVSVSLKILSTLGAQVKMLNRNTYEIDTRHLVTTNVPDDLSRQMRASYYFLGALLSRFGKAQVAMPGGCNLGPRPIDQHLKVFSALGAEDSVDYGMITVRTKQELTGAHIFFDKVSVGATMNGMLSAVMAKGQTILENCAKEPHVVDLANFLNMCGADVRGAGTDVIKVRGVEKMHGCTYSIIPDQIEAGSYMVAAAATGGDVLIKNVTPKHLEPITAKLRRAGITVEEFDDAVRVSRTGDILPLKINTMPHPGFPTDMQPLMGVLLSVAKGTSTITESVWDNRFRYVDELRKMGASVQVDGQVAVFEGVEKLSPAPLRASDLRAGAAMVVAALMADGTSEIEEIGHIERGYENIVEKLRGLGAEISKVERMPAALEQALMKFGSAFVKIDEKFNKLLEYPRVIWAKQKIMKQIQIGLCFFVEVVYNRIVINLPRCWMRTETDEIRDNLKYLTLLARDYPSQAAAASEIISTQALLKLPKGTEHFMSDLHGENEAFVHILNSASGVIREKVDAVLGNTMPEAARAELATLIYYPTEKLPQLKARCTTEDALEQWYTQTLLQLIDICRLVSSKHTRDHVRGCLPSSCGYILDELLHAHFEDHDKDLYYGQIVGSIIENGRADRFIVRLCELIKHLAVDKLHIVGDLFDRGPRPDIILDLLMRHHNVDIQWGNHDVVWMGAAAGSPICICTVLKTTLAYHNHGMLEDCYGINLRHLQRMAEQFYGEDDLSIWMPHTDAARGPYTEGMLHRCAVMHKAISILMFKLECQVIDRNPDFQMQGRDYLRRIDWDAHTVQVGEKSYPLRDTAFPTVDPADPAKLNPDEQLVLQKLVQSFRQSEKLQQHIEFLYAKGSVYHIENGNLLYHGAVPMNTKGGFAVEHFEGRRYSGRALMDYCDARARRGYYGAEGSAARQSGQDFLWYLWCGKLSPLFGRSAMTTFERLYIADPATHTEVKDPYYSWYNDEAACRRILAEFGLPGTSHIVNGHVPVQEKNGESPIKGGGRLVVIDGGFCRAYHEKTGIAGYTLVYSSRTMSLRTHQPFESAEKAVRENLDILSQKNILETENHRILVEDTDEGEVLRERVHDLKQLVTAYQLGWIPEARCEDHVWMPKTISVPTCCTLCPRRCGANRAAGRTGFCGAGATLKAARAALHHWEEPCISGTRGSGTVFFSGCTLKCCFCQNYPISAEGLGKEITVEHLAEIFLNLQAQGAHNINLVTPGQWQPWIIAALDIARAKGLRLPIVCNTGGYETVESVQAWRGYIDIWLADLKYVSSALSAELSAAPDYFAQAKPAIEAMMAQAGHPVFDADGILQKGVILRHLALPGHVEDSFAVLDQMAAWNDADPGCFLPSVMSQYTPFYKAAEHGIGRRITTYEYRRVVNYAMDKGLVKGYMQQKSSAKEEYTPSFDLTGVMILRQGSFFGNFTKFYGLFSLACARKRLHSVRERTIMDTTMCMEHFNPILGSEPNGQKFITCGEIMLRLTPPNYEKIRMASAFEASYGGSEANIALALANLGVDSTFFSVVPNNSLGKSAVRWLRSNDVHCTPMILTEPDETPSNRLGTYYLETGYGIRASKVIYDRKHSAITEYDFSQVDLDALLEGYDWLHLSGITPALAPNCRSLILDMLKVAKKKGLTVSFDGNFRSTLWTWEEARDFCTECLPYVDVLMGIEPYHLWKDENDHSKGDWKDGVPLQPSYEQQDEIFQRFIERYPNLKCIARHVRYAHSGSENSLKAFMWYEGHTFESKLYTFNILDRVGGGDAFASGLIYAMLHNYKAMDMINFAVASSAIKHTIHGDANITDDVSTIRNLMNMNYDIKRMLEIQNVSKTFNAGTVNQKTALNGLNLKLNEGDFVTVIGGNGAGKSTMLNAVAGVWPVDEGKILIDGVDVTRLSEHQRAAYIGRVFQDPMTGTAATMQIEENLALAARRGKRRTLRIGITKAEREQYRELLKTLDLGLEDRLTARVGLLSGGQRQALTLLMATMNKPKLLLLDEHTAALDPKTALKVLTLSARIVEENHLTTMMITHNMKDAIKYGNRLIMMHEGHIIYDVAGEEKQKLHVSDLLAKFQIASGGEFANDRMILSNMEIIARLANLPGALPGACAQGLIWGIMAIGVYLTYRILDVADLTVDGSFGTGGAVCVMCLLSGMNVWAALLVAVLAGLATGLVTGLLHTFMGIPAILAGILTQLALYSINLKIMGKANQSINVDKYGLLISLRWVKEFALHNPIIMVILATAVVIGVLYWFFGTELGCGIRATGSNPAMSRAQGINTNFNIVLGLAVSNALVALSGALLSQYQGFADVGMGRGAIVIGLAAVIIGEAVFSRIFHNFALKLASVSIGAIIYYIVIQLVLTLGFDANLLKLLSASVVAVFLAVPYWKGKYFSKPVKKAKEDAKNAMRKITRRSFLTAAVACGAAAALSACGGSSSASSAAASSTVASASVAAASNGEKFTVGICQLVQHAALDAATQGFEDALTASFGENVTFDFQNAQGDSATCATIANGFVSSGVALIMANATPALQAAQAATNTIPILGTSVTEYGVALGLDNFSGTVGGNVSGTSDLAPLDQQADMIVEWMPEVKKVGLLYCSAEANSQYQVDEVQKYLEAKGVTATQYAFSDSNDLSSVCQKAADENDALYVPTDNTVAANTGIVDGICRPAKKPVFAGEEGICSGCGVATLSISYYDLGYTTGEMAVKILNGESDISTMPIEYTDVTKKYNKAVCDDLGLTVPEGYVEIEAMRDEAIDLCGQVDFTRTDAMPLLERDTQFRFACAGCGNCCRGREDIVLSGYDLWRIAARLRLPPQIVARGYCRSSIGRVSHLPVLRLAPVKENRNNCPFLTENHCAIHEAEPLVCALYPLAQEISRAGEVHYFLQPTGCGGQVIEAKVQDYLARYDVPAREAIDVRWAQTCMALEDTVEQLEAVLSPVLVHRMQAKLWQALYFGYDYAQDYLPQLEANLQTLDTELHKLTEYQKKRNNSSKMKRFHRRSRRLCILAALLVLLVLFLRQNVLLDTASRHAILLNAQSGRVLAQKRADERTAPASLTKMMTVLLAIEAEPDLDKQVTLPEDIFPALQIEKASMAGFVPDETVTVRDLLYGAMLPSGAECCEALAQLVSGSEENFAALMNQKAAELGMKNTHFTNATGLTDTEHYSSAADMAKLLQAALHNTTFRTIFTTKHYTTTATAQHPEGVSLTSTLLGKLDGTELPEGAQIEGGKTGYTAAAGLCLASLAIVNGKEYILVTLAAPGDHGTEQYNIRDAVHVYRKLADKKMNKYFALRKTNRMRTELLTEKSQEQLKEVIRYLRRVSWDFCGIELVRSDLLDIAIQANKENQELFHSISDAKTFVEEVKPSLKTLRAGDYFWYVAPLYFFFGWGVEGLLLYPVIGNWVFELSVGYLMQLVVAVAAFCVLFRRMMEQVGFPPREHWLKYAAWLVLYIVILYGTGWFFTQIAGKIVLLRLPILSYSVFCLLLGAGLYAVHFWRYGKDSRLSARIMENNAQLLKGVLEYCVLKLIAQEPTYGYEIVMHLKQVGFSDLSESTLYPLLLRLEQQGKVTVERRPSPKGPSRKYYIVTEEGRRALLEFQQDWSQLCQLVEKIFKEEPDEEKEVPSEAIGQLRSYYEKTCPRLVPEIATELIVLDKDAQPALESSAGYNQFLIGAPHYLLLMSAPHSMNYSAMIQYRRSVHAFREKEVPSEAIGQLRSYYEKTCPRLVPEIATELIVLDKDAQPALESSAGYNQFLIGAPHYLLLMSAPHSYAAINAGYMMEDLVLKLTELDIDTCWMTFTDSDKIKKALSLATPLEVAAIVAFGYGEKTAKKLRLNILSMSQIDVRAEQQYYAPKKGVHDLVHMGSWSNKSGLDEMMDFYDDMLWQSFYAASLSPSYLNRQPYAAAHPQDKENFCGMTIKGMVYDDKKAAGERLLLARQEMPNADMMLLGTYRGFELNIRFDSFKNEHQAVLRAELSYPVSLGDDARGNITRLDNAIDNFADRIADAENALQNLEQQKQVAEVEVAKPFAQEEELAEKSARLAELNALLNIDRDRSSSQDAPEETEETETPATRPSVLAALGEKTNQPEPVKPFRSYYDKDGDARMKEKRDETIILRLSKTEKNRIYEKMLSMGIRSLSAYIRKMALDGYCLNLDLPQLRRMSYLLQNCSNNLNQVAKRANECGKVYAADMEDLRQRLDELIEIGRQILSRLAELLRLYLEAWRAGVKTIYYVRSKALEVEACESCSSMTELKKKPLFNPEGDPDVRLRRMIGGNTTNLNDFNNMKYAWVSDWYRQAMNNFWIMKKNISRNPLWPDWYNGKKIDEVQFGRAFLEQWPLKCVNMMQTFVRPSRDLRNHYAELSEMLKDHDHVIITNHGRGESVLINIEDYAKYEEFLHQRYVAEALAKATQQAADPDTQWEDHESVWETLSKQYDVMTYKIKYLPLAVQDLNEIARYLSGFYPKTASRVLKELREKITKLGDTPKMCEVYRLDPAYRRLVVDQYLVFYRVNDENKIVEIHRVLRGAWNLPQYLEMSQTKYILSLDQGTTSSRAILFDNEQNIVCVQQREFEQIYPHQGWVEHNPMEIWSSQYGVMNEVIAQSGVDPRDIAGIGITNQRETTILWDKNTGRPVYNAIVWQCRRTAPLVDELLKTPGMADYIRENTGLVPDAYFSATKIKWILENVPGAREKAEAGELLFGTVDTWLVWKLTGGKVHVTDRTNASRTMLYNIRTLDWDDTLLKALDIPRCILPSVKDSSEVYGYTNIQGVDVPVAGIAGDQQAALFGQGCFKPGDVKNTYGTGCFLLMNTGNKIYQSKNGLVTTIAISLDGEVEYALEGSVFVGGAVIQWIRDGMHLIQDSCDSEYYAQKVPDNGGVYIVPAFTGLGAPYWDMYARGAILGITRGTTQNHIIRAAEESIAYQSADLMWAMEKDTDITISTLKVDGGASRDHFLMQFQSDILDKEVLRPAIRETTALGAAYLAGLATGVWKSREEISHLWSCNQLFEPKMDAAQREKLVRGWHKAVGRSQDWAEHEVMTRIAFCDDDAALLHQMQDFLEQYRTLRWVQLELAPYTKPVELLADIEAGVRFDVLFLDVLMPGINGINAAREIRRYDTAVQIIFVTSSSEFAVQSYVVGAYYYQLKPIWKDSFFRLTDAVLAECRKRTQHSLILRCKSGVTRITLDSLEYCEVQGRTLGGAGGGTVPPAASAGAAGGRAAVHPAAAAVVHPLRCTLHAAAFPLPGLGAVPVRHRAAGGLSFMGYLFDYITHVYTSLLSEANPAAVEFMFFVCCAAFLCSILRASRVERQRIQMEQLQTSLNLQVTQAMREIEALRLSQQRASTYRTGHGLGVRSICAISEQYGGLTSFAAKDGQFTLRVMLMALHVLDEANRCLGCKKPMCQEGCPIHTNIPEVIRLLKANQMDDAGRMLFENNPLTTVCSLVCNHEKQCEGHCIRNRMPSHDPVHFSIIEDYISTTYANKMTAGPAPKNGMKAAVVGSGPAGLTIAVLLARWGYDVTIFDARDKIGGVMRYGIPNYRLPDSVLDDFQYRHLELKGIKVRPNTTIGKTITIDDLFRDGYKSVFIGAGLWKANAMHIKGESLGNVAFGIDYLANSKAFRLGDDVAVIGVGNSAMDCARTAIRNGARHVTCYARRDESCISASEYEVSYAKLEGVGFRFCKAPVEIRENGLICRDTVKGEDGKFTQVEGSETFYPHTGVIVSVSQGSESNLVKTTTGIETNQKGLLSVSEDGCTTREGVFAGGDAVMGARTVVEAVAVAKKVAVAMDEYMKSLPADTAADPYADIPVFQTPTSDVLAKQQLMKFAGIIAEYDPFHNGHAWQLAQARALGAQRVAVAMSCGLTQRGALPLLPEAVRVQAALACGADLVFALPAPCACAGAEAFARAGVRILAAAGCDALVFGAETPDTALLQKAARVLCSEDYRAALRQQLAAGARSFAAARQAAVQALCPGSDVAALLDKPNNNLAVEYCKAIIEQNVEMQPIALPRQGADHGQALTESAHAAFASASALRALWAEGGAAALAPYVPEKALKLYKQAEYDGKYTDFAVMGHCELALLRAACAGQAPFATVRGVSEGLEHRLENAVRETASLPTLLDALTTVRYPRARMRRLAMDAALGYTAQTPALPPYLHLLGARKEALPLPGETALPLSHSLARLTRENETCAQMAAAQSRASDLGALCRVKPEPMGGIYRQKIIFLTNMLPPENFCTVRSLKTCGQNFTDSYVYYIIGVAAFQGATRAKRMKILVINCGSSSLKYQLIDMDGEKVLCKGLCERIGMESSMITHEANGTKATTPAIFPTHTEAFAEVVKKMTTGAGKCINDVSEIDAIGHRVVHGGEKFKSSCLITDEVINTLRELSPLAPLHNPAGILGIEAARKVFGNIPMVAVFDTAFHSTMPPKAYMYAIPYEYYEKYGVRRYGFHGTSHKYVAHKAAEYLEEPIERLKLITCHLGNGSSIAAVDQGKVVDTSMGMTPLAGLMMGTRCGDLDPSVVNYLKYTLNITGHELDEILNKKSGLLGISGVSSDKRDVEEAAAAGNKRAQLASDMLNYQIKKTIGSYIAAMGGVDAIVFTGGIGEHDAIARAKICHHMDWLGIRIDTEKNKHPVGDVCEITAWGAKVRTLVIATDEELMIARDTKEVIEKMFEDKTLVCKDCGKEFVWTAGEQEFYASRGFENQPQRCKPCRDARKNGGARSNSGERQMFDAVCAACGKACKVPFQPREDRPVYCSDCFARMKQNMPCISFIVPVYNMERLLPRALRSLRAQTLTDFEAILINDGSKDGSAALCAQAVAEDARFRFIDQPNGGVATARNAGLDAARGEYIFFLDPDDWVEPDAAEVLYHAARNADADCVEFGLYLDSYDENDRLLHTQTSGSTLSGVYRGAPFKEHFDETASSYLVTNKLFRRAFLEQHRLRFSCHQLGEDGLFFVAFYRQNPGCLVVLEKPLYHYTAARRGSLSNSYHPERLEDNFYLSDAVWDTVAAWGLQDSPMHRAKASYCTIRDLMMGIKNLGCSPLSLSEQTAWLRSTLQKPRVRTAVRSTPLHAMQSRNDQVKLLLLKLRLCRAVLLLSGANQRKNTMRTLDQILTKKDYSRKTPASLFYKDSPLWQKLLTIGCVVFLAGAGLGEWKPINSAVGGLPKAISLGVIGLAMLYTLFYPDEKRLRELWKPTLLYMSLMAALFFWSMVIWIESFAAVSSMIRSCSKIVFQSIAILTAVALVYLFREKAIELFTISICIANTAIMLLSIPGYGFAASIQSLVTCLITFGDADGYALQLEIHDLTFVFGQMILYYAVFAPRTTRQEKRKRWLYLLLCCWFFLVGMKRIAIPAVVLFVLIALLLRKRKVPGWFYPAVGVCCILFFLAFLYCVRYGVISRLLNSFGIDMMGRDYLWSMANPYYEFSITYIGRGFEYVDTIIAQWYNDGLINQPYPFHNDILKVFVEVGFPGFLLWSSIQYVLTPLFWQRYADQETTLLYLSELGYMTVTYLTDNTAFYFWSTMALRLVTLAYAMERKKPPEPKVWMPDSRQEMRDRIHILMKEVMIRVLHSVSNMDRGGIETMLMNYYRHIDREKVQFDFIVNKQKPGDYDDEIRRLGGHIYQSPGLNPLHYPAYLRFVQQTVAADPRIRILHAHNEAMGLYALKGAEKAGLQVRIAHAHNIWIVRDYKWPLKMFCKQLLPGAATHLWACGRDAGIYYFGKADWERRGQIIPNAIEPETFRFSPAVRAEMRARYGLEDRVVLGHVGRFDVRKNHERLLEIFAAFLQLEPRAMLVLIGTGRLEQAVRAQAQELGITDHILFAGLQSNVADWYQMMDLFVMPSRFEGLPVVGIEAQAAGLGCVFSDAVPAEVLLSSHAIQIPLSASNADWAAGLQRMLHQPCDRSAGAELIRQAGYDINIAAARLQQQYLQLGGQAMIQNRRAYQLIHCHTRSRLLAGAAAVCGAACGHADLGLYHLLHRGGAPLPDSTQADRAALAALCPKPAAEETCPLLPQQDPAVTLSVIVPVYNGEATIGPCLDSILQQETSCTVQLIVVDSDSTDGTAAVLERYRALPGVLLCNCSAPRSAAAARNEGLRHAVGRWLMFVDSDDLLLPGAIRTLLEAAQRLDADVVQGGWQYLYTDGTHGSMQRYPAAVYTGAAAPERFELPGMPWGKVYRRELFAQVRFPAYYTCFEDAIIHFLVFRLAKSVASVPEVVYLWRKNPKGLTATSQHRPAAVQSYWIMEQLAVQDAALGLPHDALYRCTLTLQLSAFCYATVSGLPPETQQAVFRLCCALYAKALPQAGALPRRARWGARALRQQDFGLWCRYGRRFQLLMKKFEILRYLKRFSLLIFLVSLAGAAAIYLYADGRQKYTASVIIRYTNDGISDGYTPDGSELDVNEIYSSTVISQAMDALGASGRLSTIRSNISVTPVISEDQQTINEALLQKGEEVTYFPDTYKVSLVVDGEQGAGYARNMLDAIIQSYCTYYTEKYVEQKLSLNPSSGLLDNGYDYYECIRILENDTNEMQDYLLSKREHYPNFRSSRTGYTYADLCDIYSDFKKYTIPALYAYVLNGPQVRDGTVLQEYLANTIETAKQNEQITTEQRDSLWSLTDQYVYKNADLLQNYFTDRGEVVSSDYILNNIELEGAGDKAQTTYDGLVLKLVSLEQQVASSQIDRQFQEEILQSFRNVDFGGTGEQHAKMESMINDYEAQLKSYYEIINTSSKELNLYISADYLKMISSVQVAAAINVKLYLMLALVLFFVIGCCGAILLGRISDAVDYLLYVDKKTGLPNREKLNVYISGMADRILPEDYTCFALQLDNLTEMSRRFGYHVGDGILKDFSGLLQLMGDTDGTVGYNGAGKFLAFFDECSTRKAEVMIRILQSQVDEYNKLNPEYPILFTAAWATTSEEELYHVRDLVRCAQKKMSLIAEEGGAVLAGMERGEAMDDIKEKIKQALRHIWTNKYRLFLCLLTLCCLFGLVHYFKSADSATASISFNYSEAALGMNPNKTRFNAYEIVSDEVMERAIRRVGLQDSLTASQLAQCLSLSPDGTGSANGSEYISTNYYLSINTRKLNLGNRKPTDLLQSVCESYREIFLSNYCDNQSILKEKLEVTTACEPYLRLNELEVRAAALNRYLNARLGENKSFTDDTNPDPSTNNFTTLGKMINNLVDYDLPNAMAFVIEGGVARDPAMLTSILEYKNKIDDIDMRTQQAYYDADKKGISIYEKSMTSIMMIPTVDESSEYYMSRTKTAMDALARAADASLADATDYQSEIVSTNYVIQKIRELDAGQPRLAEAQAMVNKLETAINEISEQLFVLDKAYIKYKSQNYITFTYGSASFLQRLSLKKTLMESVAVMLGSAWLLHERKRRKARHRRMLLTLLVLVALLALLGGALWQNICYNRIHYTAEFYQIHSRKLTQSCRVVFLTDLHLREYGADNCELVQDVRSLAPDLILLGGDFVTYGEGTDYDNMLSLFRQLSEIAPVCGVLGNHEDELYFLDNDRELVEKFTAAGVTVLRNQEARYTIHDNVISILGVEGSPADFSNYGASTFMDSVEPQTDYDLRICLAHVPTYFPEHLENYSFELGLAGHTHGGIVRLPKIGPLYTAEEGFLPDYAGGSYTLANNATLIVSRGLGDSSRAPRINNVPELSVIDIDMARDNIRNFCIIAHIDHGKSTLSDRILELTKSVDERTMEDQILDNMDIERERGITIKARAVTMNYTAKDGKTYEFNLIDTPGHVDFAYEVSRSLAACEGAILVVDATQGVEAQTLANTYMALEHDLELVPILNKIDLPSAHPDEVAQEVEDVIGLPCMDAPRVSAKTGLNVDQVLERVVSDIPAPTGDPDAPLKALIFDSIYDSYKGVIVYIRVFEGSVKPGDTIRMMATGAEFTLVEVGHMGATSLTPCAQLQAGEVGYLTASIKTVQDTRVGDTVTLAERPTAEALPGYRQVKPMVFCGIYPADGAKYPDLKDALEKLQLNDASLTFELETSAALGFGFRCGFLGLLHMEIITERLEREFDLDIITTTPSVRYRLTLTDGTVEMIDNPSSYPDPSNIVKQEEPFVDVHLYTPNDYVGGLMDLCQSKRGVLIDMKYLDDVRVDLHYALPLGEIVYDFFDAIKSRSRGYASYDYEFKEYRESDLVKLDFLLNGDPVDALSMIVFRDNAYAKGRRICEKLRDNIPRNLFEIPVQAAIGGKIIARETVKAMRKDVLAKCYGGDISRKKKLLEKQKEGKKKMRQLGSVSLPSEAFTAVLKLDSDDDMQKQPFEKHVWAEIDLEALRYNFREVKARAGALPLCAVVKADSYGHGAVQCARVFAEEGAAWLAVSCLTEAVQLRKAGQTLPILILGHVQPAYAAALIQNDITVACYSLAQAHALSEAAVAAGGRVHIHLKADTGMGRIGFALRTDFDAAIREMLEACALPGLEMTGLFQHFSVADDTAPENVAYTAEQHALFVKAFHALKAAGREPALVHCDNSAGVMLHPDWPEGLPRERCMARPGIILYGYDPSDEVRFGRFKPVMTLKTVVSMIKEMQPGQCASYGRRFTAEKPTKVATLCTGYADGYPRLLSCGKGVVEIHGKACPVLGRVCMDQMMVDVTDVPEVREDDEAILWGGTVSDTAETIARKTDTIPYEVLCGVSRRVPRVYRDHGQIVAVEDWILEAMSDLRAMQRLCGLMRKAVQDYEMIAPGDRVMVGVSGGKDSVALTIGLSMLRKYIGFDYEVVAVTLDPQFDHQPMDYSALAELFRQHGIPYEVRHTEIGPVVFEYRKEKNPCALCAKLRRGALHTAAQELGCNKVALGHHLDDAVETFYMNLWREGRIGCFSPVTYLSQRDLTLIRPMLLATEYEVQCAVREADLPIVKSRCPADGVTVREQTKEFVQERCRTDHAFRQKTLHALQESGIDGWRPVHTGRGSFIVPKKETDHAETTVMPNEIDRTSSAQRRSSKLLTAMAIFICLGIAAYMVLTLLVNRQTPATPDTHYTGTNGVSVYYDSSVWSVCRMTEDATLGTVLELATADTADSEDYQAVLLQRGTADSYENFIEDSEADLKQAYGVIKPRKVNLTVEGAAVEAVRCDIRTYYAVLATITYDSGDVVYVSALTKLASISDVVNLVESVSLSMAKICRGGQKTFAKIEIQKSRGFERKRAILRVSKISAEKIQKSCMSTTLVKPAEVERKWYLLDATGKSLGHVAAEAAVLLRGKQKVDYTPNVDCGDFVVVINCDKAVLTGKKAEQKFHITHSKYIGGLKKVQYSKLMAENSDLAMTYAIKGMIPSNTIGDKALTRLHCYQGAEHAHAAQKPEKIEFMYETKPYFYGTGRRKDSVARVRVYTGTGKITINDRDIDNYFGLETLKLIVRSPLVLLGLEGKYDVVVRVSGGGVSGQAGAIRHGLSRALLQQSDENRPVLKKAGFLTRDPRMKERKKYGLKAARRAPQFSKRMLEQSFVSASGSPLAGQPPEMRSRAPQFSGKGATKNGSAEAEPMRGEPEALKIFAQASRAKTKSMGLRLFCKLFMNPIDKVGEMNTNQYTQKTLEALQAAQQLAVEYQHNALEPAHLLHALAAQENGLIPQLLQKLNVDPGSFAAAVAEKLSALPRVSGSGRDPDKVYISQATDKVLSAAAREAKAMKDDFISVEHLFLGLLDEQDQTTSELFRAFNLKKDAFLQQLTAVRGNQRVTTDNPEDTYNALQKYGQDLVELARKQKLDPVIGRDQEIRNVIRILSRKTKNNPCLIGEPGVGKTAIAEGLAQRIVRGDVPENLKNRTVFSLDMGALVAGAKYRGEFEERLKSVLNEVKKSEGKIILFIDELHTIVGAGKTDGAMDAGNLLKPMLARGELHCIGATTLDEYRQYIEKDPALERRFQPVQVDEPTVEDTISILRGLKERYEVFHGVKINDSALIAAATLSDRYITDRFLPDKAIDLVDEACAMIKTEMDSMPSEMDDLAHRITQLQIEQVSLKKETDALSQSRLKDLEKELAELQDKFRSMKAKWENEKNAIGKVQTLREQIEQTNAAIEKAQREYDLNKAAELKYGKLPQLQKQLAEEEKVAAAKKEDSLLRDRVTDEEIARIVARWTGIPVEKLVEGEREKLLHLDDVLHQRVIGQDEAVTKVSEAILRSRAGIANPNRPIGSFLFLGPTGVGKTELAKALAQALFDDERNMVRIDMTEYMEKFSVSRLIGAPPGYVGYEEGGQLTEAVRRKPYSVVLFDEVEKAHPDVFNILLQVLDDGRITDSQGRTVDFKNTVIILTSNLGSDIILNDLEQRRAQGSNELSEDAKHQIDLLLKSKFRPEFLNRLDEIVYYKSLTKDEMRKIVDLQLQDLRNRMEEGKHLKLEVTTAAKDFIIDSAYDSVYGARPIKRFIQSRVETLIAKAIIKGSYAEGDTLTVDYDGSALVLRMHPCAEYVIIENNIDVLFIVEMATMESTFLYTEKPAWHGMTLWVALVVLVVFSAFFSASETAFSSLNQIRLKSRAEDGDTSAARVLAMAEKYDKLLSTILIGNNIVNIAAASIGTIIFTKMLGAERGATVSTMVLTVVVLIFGEVTPKSLAKEMPETVATAVAPALSLLMLVFTPLTWLFSQWKRFLGHFVHSTEEDTITEGELMTMVSEAENDGELTDRESELIRSAIEFDDVEVEEILTPRVDVIAVEDDMPLEEVAQTFAESGYSRLPVYHDTIDNIIGVVHEKDFYMARLKKETKLEDLVKPTLYTTGSTQISQLLRTLREQHHHMAVVVDEYGGTEGIITLEDILEELVGEIWDEHDEVTEDFRKQSDGSWIVLGSAGVDDLYERLGLPEDEDIDSNTVNGLVQEKTCRLPKVGDRFTLGSYDGVVTRTAKRRVTEVRLTPAEKPDTKKDEEEKGHFGRMTSKMDLSAFNLQGKVALITGGAHGIGFSIAEGMAKCGAVICFNCSSEASLEKGMAAYKAAGIDAHGYVADVSDEDAVNAMVAKIKAEVGPVDILVNNAGLMKRVPMIEMSHADFMRVIDVHVGGAFNCSKAVLPDMMEKRAGKIINICSMMSELGRETVSAYAAAKGALKMLTKNIASEYGEYNIQCNGMGPGYIATAQTAPLRERQPDGSRHPFDSFIVAKTPAGRWGDPEDMVGPCVFLASHASDFVNGQILYADGGILAYIGRQPKMDIRYSCNQKDFKRYTTEEMRDEMLITGLYKADEVVAVYSHVDRMVTLGCMPVHETVSIDKGIDIWANFGTHYFLERREIGMFNIGKDSTGIVVADGVKYELGYKDCLYITQGTKEVTFASADPEHPAKFYMVSAPAHCAYQTRLIKMADANHRPLGSVDTCNKRTINQFIHPDVLKTCQLSMGMTELAPGSNWNTMPSHTHERRMEIYTYFELPEGQVVFHMCGEPTQTRHIVMHNEDAVISPSWSIHSGVGTSNYTFIWAMGGENMEFDDMDNIATTDLRMKVVTFGELMVRLQPFNYERFVQANSLEFSFGGGEANVAVSLANYGLDAAFVTKLPAHAIGQAAVNSLRRYGVDTSMITRGGDRVGIYYNEKGASQRGSVCIYDRANSAIQLAQPSDFDWDKIFEGVDWFHFTGITPALGENVVEICREACKAAKAHGVKISCDLNYRGKLWTREQARAAMTDLCQYVDVCISNEEDAKDVFGIEAEATDIYGGKLNAEGYKSVAKQLADKFHFEKVAITLRESHSAFDNGWSAMLYDVASNEYCFSKKYDLHIIDRVGGGDSFGGGLIYSLLTGKSTQEAVEFAVAASALKHSIEGDYNMMTVSEVEKLAGGDGSGRIQRMNPIVEKVYQIGIIPVIAFNSVDEALPLCKALSEGGLPAAEVTFRTACAEECIRKIHEEMPEMLLGAGTVLTCEQADRAMAAGASFIVAPGFDPEVCKHVIAKGGIMMPGTCSAGEMQQAMNMGCEALKFFPAEANGGVGMLKNIGAALKGARWMCTGGVNAKNVNDYLGYDQIFAVGGTWMCKSDVIKAGDWAKITAQSKEAVDTMLGLKLLHVGINTGNEEEAMKVANLIGAMLNMKVAPGNSSIFVGNKEFEIMKKPGRGTNGHIAIGCNNVDRAIYHLSQRGVKFDLDSKNVKNGKTVACYMADEIAGFAFHLVQAMSQEFPAIRLVALDLDGTLLNREGHVTPRTRAALQAAVDKGVYIVPATGRPLASLPPEVAQLPGIRYVITCNGAAVWDLGSDPVGAVYSRYSNAKEHRTSTPVCLLHSLMPVETAREAFAVCESCHADLRIFSDGYACTDAHSIALAAARAAKKDGTEACQPNDGRFTILRDAAEWMSRNAFAIEKLCVFFETPQQATSALPRFRAVPGVEIVQGSPKNVEVTAAGVDKGEALRALADRLGVPHECTLAVGDSENDRAMLQKAGVAAVMVNGMPEIRALAHLVSKADCDHDGVAEILETLGIMKLSQLRSRCRPHLWYQLYWVVYLLWFFWLDLTVTAPKYIIHSPLDDLIPFNEWFVLPYCSWFLLLAGVTAALWWCDTATYDKLCLTMFSGMTFCLIVYMILPNGLELRPAVETLGRDNPALRIMQLLWKADAAVNVCPSIHCQSSACMAMAFSHSKLAEGKPLRKVLAWAWAALICLSTVFTKQHSVIDVACGLAVAFVWLPVVYRPARALHMASLSAREQAYQTIRSRIITMELKPGDPLNDRELAEQMGISRTPMREALIMLNIAHMVDIKPQSGTHVAPIDLKRMELEQFARFTLEKEILNRVRGRLTDQQEQEYRQVIENYRLLEADLTQPNRETRLLELDNQFHRKAFEITGMEAHFDHMLSELQHVERIRKFSLQTNENKSVCAAHTRILEMVLHGTADELGEALESHLNRYKLSVEQARSVHPEYFTEGMRAVIETVFDIFYLVTVLTVGIRMIRDSKTGTQFRLFGLMAVVLGAGDAFHLVPRALALCTTGLENYAVPLGLGKWITSVTMTVFYVLLYYVWRKRYQIEGQKNVTAAVYALSAVRIVLCMMPQNQWLTNHTPLAWGILRNVPFALLGLLIIVLFYRSAKQNNDKAFRWMWLTIVLSFGFYIPVVLWADVNPMIGMLMIPKTCAYVWTVLIGYNAMKAETGNQNMNPMATSKADILKTSRELIQQNGWAAVNIRAVAAACGVSVGCIYNYFGSKTELVSAAVESIWNDIFHHPEDEAVFQDTLSCIRWMYRQMEYGCQQYPGFFTHHALGFVRQDTANGKQQMRQTWQHILDALCNVLRHDAKIRPGAFTEQFTPEQFAGILFSLMLSAVVQQNFDPSAVLEIVRRTIYMVSAPGSIPTALVGLMFSYYTHIDKKSKLFSSKINDETRTVTILTMKLKTVAIAAAALALAVGMTACGGAASTAASSTASSAAASSEAASSEAASSEAEATSAEYTVYNTTGSKVTELYLYDAGSEDKGENLAGEGLADGESIVITRDVEADKQDDVVYVLEFTTEDGNTQSFDTLHYEVAPISLKSVDAAAGATAIAFEAPQKMRDPYEVLGVQRGASDDEIKKAYRAKCKRWHPDLNPNDPTAEEHFKEVQAAYDAITKGDTGPQMGGNPYGGYQQQSYNRQSYGQQGYGQQNYGYTGFDGFDGFEGFDPFGFGFGFGGYQQAGPSASGTDTPEMQAARNFVANGRYAEARRVLDGMTGRNARWYYLSSLANQGLGKSVDALQDARRAVQLDPNNTEYQMHLRRMQNPGQTYRTQTTYAQPGGLLRWCWSMILLNLLCNCCCGGWGFRGFRMMFGYVIPDRASLSPEAQSRYRSAYCGLCRRIDALHGLRGRFSLSYDLTFLNILLCSLYEGETPADSGISRCPIHPVHGVLWRSADPTDYCADLSVALHYYNAQDKWQDDHNLLALGYSTLLDNSTAEAALRWPRQCNAIRACLAKLAEYEAAGSTDLDAVSGCFGALMAELFDYRQDRWAPELRSIGFHLGKFIYLLDAYDDLSRDKRRGAYNPLRELSTHPDYEEEMLDIFELLLARCAQNFERLPCVEDVDLLRNILYSGVWLKYNCKNAKRTGKPDASMREKFRQFMIGRYGTDGLNQFLSMSSIVMLLVSLLTRISLFTWLGAALLILCYYRSLSRNISKRTEENYRFYSLKDRFNNKFRSLKEQWANRKLYHYYRCPQCRQKLRVPRGRGRIQISCPRCGTQFIKKSMEHYDWNEGWLFAPTFDPALVRPECPELSLTPVRLPHTVKPLPYNYCNENDYQRLCGYRREFFAPKEWLGRTVLLTFGAVAHDATVFCNGRRVFHHGCGYTAFTVDLTGALRLGQKNVVAVRCDCREDLNVPPFGGQLDALTYGGIYRAVSLDIKEPAYLRDVFIEAKAEGDFRIYTATVGETVGCTLQAEIRSPAGSRAVYSGELSLPITGTLNNVHPWSLEHPTLYTLTMRLIRPGTGGLPDRVLDEKTVRFGFRTVQFVAGGLYLNGQRVELRGLDRHQSYPYQGYAMPDSIQRLDAQLLKKELGCNAVRTCYAPPSPAFLDACDELGLLVFPEMPGWQHIGDEVWQAQALQNCREMVCQYRNHPSIFLWGARISGSPDNEAFYKRTNEAIHRLDPTRPTAGTRSTRKSQLLEDVYAYNDYSYAGRGAGCENRAAVTPDTRKGYLISEFGGQNFPAKPFDDEPHRLVQALHHAAVLNDSIAQPGVAGSFGWCMADYNTHREFGSGDRICYHGVMDLFRNPKLSAAVYASQKTPRAPSDIVLEVSSAMTLGDLPGGAAAACWVFTNAESVRLYRGNDFVAEFGPDRRGRFAALPHPPIEINDFVGSLLEKYEGMDHATGAQVAAILNELRRDAMALSPLSKARMLSLRLSWSELLRMYYKYIGVLGSSAPVYRFEAVWHGRAVRTVVREPVQSVRLECTVHNPLLTDGPTWDCAAVSLRAIDQNGNLLPYCGEAVCLSVEGPLKILGPSVVPLRGGMAGTYLATTGEAGRAVLHCRMEGALDTEAVLTVRSREEQNVMVSQSYERKKHSRPFCAGTAEILQCAKAAADRLPNKCGVKIVQLSKKMKRILAVFLTLAMALNIAPAAAFAAADSDAASIVAVEETDETSSPQLDEETARAIASDPFLQAAYAQTEQEQTGQAEVDTSNMSVSATNSFGQLLVNGLGMDGENGSDLSSESRVIEITMNGSTAMVKYIAKKDANLVVGIYTDDSEQEMIASGTVAVQATPDNTASSIVEVPLSGEIPEHYTVKGFLLDKEDHAPLCKEYTNAFYTENVEELEGATIDDFDSARAVNLDDDRTTNFGVVKQGVILLQEDEPENGAGENIVVLDDSENQIYQFENASTELLNLKQGNIIVYKYGENNLIIAHVADFEINGTTVTIYGDEDFQLEDVFSILKMDGENTTDKAIVDTETGDGKVSYIGTQEIETLDSTNEWEGKAEFSHVFKISTDDGKDEDSEEKPVSGSVEGTVSIKAAIKLKLRLCDDNKMVSLSFPMTEKFELEGAVEYKGELLKFPKITLPVYGCLSVGFEPQMVFKANASVAFKMDSTQMIGFEWSQKDGTQNISEAPVTSINFKLSGSIYLGFDMAPKAELGVGKVSLVKLKFKAEAGFELSAEERLGDQGTGLDEIHGCKNCYEGELEFKITLGVSLKILLYEPKIEITPFSHSFGKAYASADYGDFGWGECPHVKYRLTLKAGKAGAGATVKIQSNDSDTSSLYTETTLDADGNSTVYLPGREYRIIADKGSMEFVKTIKLSRGITVDIDLEQGSTGGNPGTTDPDTPDPDKPDPDNPDPDPTPPSETIVASGTCGDNLTWKLDDEGTLTISGKGAMTEWVNSDSAPWKTYSNTINKVVIQPGVTSIGGHAFSKCKNLTSITIPEGVTSIGSDAFSGCSSLTSITIPEGVTSIGEYAFYACENLKSITIPKSVTSIGNYAFGGCSSLTSITIPEGVTSIEGGVFYKCSSLTSITIPESVTSIGWYAFQGCSSLTSITIPESVTSIGWYAFQGCSSLTSITIPEGVTSIGKNEFSGCKNLTSITIPEGVTIIEAEAFRGCSSLTSITIPEGVTNIGENAFRGCSSLTSITIPKGVTSIEWGTFRGCSSLKSITIPERVTSIGEYAFYACDGLIDVTYHSTMERWEKISIESNNYYLLNATIHCTDGDIVPNTENSITTGTASTSDSKFQAAFAEAKAGKEYVVLVSRSGSDPLNADNLIYINQITADADGELTVPFITAADAAEMTYVVACAQDDATVEPGQPDKPNQPDQPGGDKPGGDQPSSGDDGGGAAIILIGGVAAVAAVAGVALMMPVKVEGTVKLADQPVANATVQVLKNGNVAAQTTTDANGHFTVKVKRGGYTLRVQWTDASGQPAVRTVDFKAPNANLNVAAMKVLLINGSPHEKGCTYTALSLIAGELKAQGIETEILHVGGQPVGGCIGCGGCRSGNGCVFGGVVNEAIEKAKTADAFVFGSPVHYASAAGNMASFMDRLAYAGGKYLAYKPAAVCCSARRAGTTSTLDQLVKYPQFFHMPLVNGSYWAMVHGSNPEQVLQDAEGCAVMQELGRNMAWLLRCIEAGKAAGIDHPQNPPRPMTNFIRMRVIAGEARGRRLEALPGTDVTRPTLSQVKEAMFSIVQFDLPGARVLDLYAGSGQLGIEALSRGAARCVFLDENREAVSIVMRNCKACGVFDRSRVNIGEAARFLSACREQFDLVLLDPPFRGGTLEKILPAVEKCVAPGGIVLCESETGIVLPAQTGSLTLQKQYKYGKVLLWKYTKPMQSAAGQEGEALMNVNELLDTIEDALEESANVPLSGGKRIVDVEQIRDYLDEVRAALPGELRQAQQIVNDRAQIVDSANAQAQAIVKKAEERARILVSDAEIVKAAQQRASEITSAAQTEARTLRQTVTDYCENMLRTTEDTMVENAAQVKNIRASLRQNAKKNGMFFGRYDYTIDTKGRLNFPAKFRDAMGESFVVLEWVDSCLFALPMEEVERLADKLESDELMDSWAISGDLFSTACEVAPDKQGRILLPAELRTYAGLKKDVTIIGNRNHAEIWATEVWNARRAAVTNDQRAERLRKLHLMAFEEQQPFDPASFEHIPVLLNECLTGLAIDPAGTYLDGTAGGAGHSRQIALRLDAAKGGRLISLDQDPDAVQTARSRLAGLPATVVQINFRYAGQALEQLGIEKINGALLDLGVSSHQLDDAARGFSYRADAPLDMRMSQQGETAADLVNTESREELARILRDYGEEPYAWQIAGKIVEARETAPILTTLQLADIVASAMPPAERRKNKNPSRRTFQALRIAVNHELDALEEGLDTIFDHLAPGGRLCVITFHSLEDRLVKNKFRRWSTACTCPPEFPVCICGGKAKAKLITRKPIEADTQELEENRRSRSAHLRVLEKCMGQPAYDRNAVRRRRAPQPQRKANLRVAKGGKRRLNPLQAAVHNAMNLVAAALLVGFAISLLWSEAQLVELNDQIQATKAQLVSEQSQYTYYNSTLNSKTNIASVEETAGRLGLMKVDPSQITYIRLGESGALVRRESTVRQWTDFLYTGAVNILGTVRMQEPFRNKKNRGYRLRPASGRDRLDSRVRRLCSRLGILAVVVAAAIVIRSLYNIQILHGAEYRQYAAQQQLLDTTIKATRGEIYDASGITLASTSVVWTIWADPSYSSILYTSKTNDDDTVTKTLDPAMCAEVSRELTLRLLSGDGESLDSVDTSSAEYQQQYQTVYDALSRLDSAYVTLATKVNNAVKLSIEKYVTSFNKAHKKATDTSRKGRISVSSEKSFQRNYPYGAFAAAVLGFTDADGVGTYGLEKSYQSTLAGVDGRTITQRNAVGNAIADANATTFAAKDGSNLVLSLDVNVQEIAERYLNEAIAANTVENRGCAIVMDVKTGAILAMASKPDFDPNDPLNFTANEAYLNELVHAEPELYGIYKKDADGNYITDELGNKILDEEADYSGYYRDILWKNKTITELYYPGSVFKVITSAMGIDSGVATMNTTFTCSGAYGVAKETYHCAGRKAHGLLNMAEALRKSCNIYYIQLGQRVGSQQFYNYFDAFGFTARTGVDLPSETNFMQYYRADQLGEVQLASSSFGQAMAITPLQMCTAIAATVNGGYLVTPHVVDKITDANGNVIQEIGANVRRQVISQSASEVIRQMMEYEVGNGTGGGKNAYVSGYRIGGKSGTSEQLNMHRRADGDYKKVASFVAVLPANDPEILVYVMLDDPNNARTDYSSILAAPVAGNIISEVAPYLGIATDGEDRSGTIVTVPNLVGTEWSNAQVQLNIQGLKHQLQESQSSQSAAPVTYQYPHAGSKVPYGTTIYLYTDTYEGSRTEVPDVTGKSPDFARQMLSAAGLNCVVEGSGTVQAQSDEPGSSVQRGTIITLTCGMEKIHASKLLAGLVPAGKLTSDPEVELVTTDSREVKPGCIFVAFPGERFDGHDFAARALEQGAEYVVVNHPVPGVPEEKAILCPDSYHAMMVMGANYRSQYHPKMVGVTGSVGKTTTKQMTYAALSSFGETIKTEGNQNNELGMPRTLMRLESSTEYAVIEMGMSHAGEIDRLARAARPDVGIITCIGVSHIGNLGSQENICKAKLEICNGLPEGAPLVLNYDDPFLRKAVLPAHVRPVWFSLSDENADVCALSIRQETDGMSFVLEDQEHGTFVVNIPAMGRHNVANALAAYCAATRLGCDAKRVVRGLSNFEQTGRRQKVVDSEGVTVIEDCYNANPDSMKAALAMFKDFPCKRRFALLGDMLELGELSREAHEELGRLAAESGLYCLITYGEQAKRTAVVAAAKGVKTLHADSYREAADALLDRVEPGDAVLVKASHGMALEKVLDIFYEEHKEAEVMERFALAAAVVLGFALTAALCSLFVPLRRVLERREQNQQPVQPEQPRPAPLRAPLWGGLCAAAGTVAAVGVGWLAACVGQPELLGSEGRLMTRLLTALAGSLAFGAVGLAEDLARMRSPAALGLRRDVRLLLEALAAAFVLLLLRAAGCLPRGLGVPGAGYVLLGSAVPFLWAVLMVALAECARIAERDEGTVCGAAFVAMLALMMAEAGLGVPGLAVLPAALAGALVALLLWAFPPARLGVGCCGSLLAAGAIGCIPLSLDMTSLTVPLALPFWAAGGLLAAQLLGAKRTGKPLRCWVKKHKMSPETVFLCSFALSAVGYVLALALLRWCMATNRKKHRAPVPVFQRDPGPWSRLLIDWLATLAVIMIFGLVMLFSASYTTGYLRMGDSFHYIKQQALCMILGLGCMFLISYVDHRFLRKMVVPGYFIVLAMLAVTLTMAPLNGCRRWIRFAGLTLQSSEVAKFEMILFSSHLAAKAPQVERLDPERRILLTPREWLRVRVWKQLVVPVLPLIPVVLLLAMEPHMSGIVLTVAVVGTILLLSGSGGVLTWAGAITAGTLLETLLSHVDSIPYLQKRLDGWTQDLSQMTDQTVQSLYAIGSGGLKGLGLGNSVEKQLWLPESTNDFIFSVVCEELGFIGAVLIIVLFVLFIVQGLLIAYKAENLYCTMVGIGIMAQIAWQVFCNIAVVTNTLPNTGISLPFFSSGGTSLILLLAEMGVMVNIGRNGERAAQQREQMRAQREAARAEREAELARKTIDLASARAARTEEMRVLIAAGGTAGHINPALAIAGALKKADPTAEIHFAGRKEGMEYRLVTQAGYPFHHIEITGFQRKLSLHNIKRNIITLWNLALSGPKAKAMMKEVKPDLVIGCGGYVSGPVVRCAAKMGIHTALHEQNAFPGVTNKLLAPDVDIVFAAVPAAVEKLGAPDKTLVVGNPVRPEVFAQAANREAIRAQLGAGDRTVILSFGGSLGARRVNEVVADLCAWEQHEHKPVLHLHATGQYGVQLFEQLQKQKDFAPGDSLVVKEYINNMPELLAAADLVISRAGALTLAELEAVGRAAVLIPSPNVAENHQYYNAMELQKAGAAVVIEEKDLTGEKLVQTVSAMLAQPGKLAEMGKNARSLSVDDSLDRITAALLKLVKTPMQQNRDRNGRPRNPRPYDLNRDVARTSAPSQDHTPRSTGSSRYGYNGEPLSRPPSRSANGSVRSSRADNSIQFPTQSQTRRPAQGQGSNTTQYPAGNRPAGSRPKNAKSGGKQRRPANNARSGQSSRKNQNAQNRPNRQHPAGSQSAPQQSPARREMRKKRKVTRATLRRRRILRRLTAFAMLLCVIGAGIYLTMTMLFRINSIQVQTPDGKQVTEIAGYSADSILQRMGVQLEENIFSFEPGEKAAVLEQNFPLLGSIKVIRDYPNTVVVQVTEAVPAYAVQNGNKWLVISDKWKILSEESTQPEGLCTLYGGKLQDTTPGQGFWFVEDADAASASGSETAESESTVNTETARMEALRTLRSKLEEYGLSQDVTRLEVADTEQLAFLYQDRISVLLGTLNDLDYKLDRARYVLTNADGKGCGPTDTGRLDFSHTSASSTRKIYFAQGEPTLPSGYVVPPKAEEPAPAEDTADSTDSAESTDTADTTEPAAETDTEQLPLTHPDRMTANEEENPMMKLEQLMEGVPFTLVQGSLDTEIADIIYDSRKAAPGLLFVCIVGTQRDSHTFAADCAAKGVSALVIQHDVDLSTLPGVTVVKVESSRYAMALMSANLFGNPARQMTMIGVTGTKGKTTTTHMIKSVLEAAGRKVGMIGTNGIYYMGRHKDTANTTPESYELQKTFREFLDAGCDTALMEVSSQGLMMDRVAGVHYDVGVFTNLSPDHIGPGEHKTFEEYRSWKGQLFKRCDVGVVNIDDENTAALLEGHTCKLVTYGRDEKADYRETGYKLLRTHDFLGVAFHVTGKDEMDVKVNMPGEFSVYNALAALAVGKVLGLPDAAIHDGLGKCVVKGRVELVPISKKFTILLDYAHNEVSTESLLTTLRAYKPHRLVVVFGCGGNRSKLRRYGMGEICAKMADFSILTEDNNRFEKVEDIIADIREGMNKGNPDAKFVEIPDRLDALHYAVDHAQEGDLIAVIGKGHETYRDREGVKTPFLERELLEEYAQQIGLEMTFEEMKKIVVDTLSCDEDKVTMEASLTEDLEADSLDAVELNMALEEACGVSIPDEELASLKTVGDIFNYINAHVMNSIKDLLPGSMRERTFQLKARRDAGAVWNDPQFVECKKCGRRATRQIWNKAQYVCPNCGVHLPIGGYYRLSLVLDKGSFRELDADLAPQDVLQFPGYPEKLEAQTGKTGLKEAVITATGRIEGTPVVVAVLDSRFFMGSMSTTVGEKITRAVEHATAKHLPLIIFSASGGARMQEGIFSLMQMAKTSAAIERFSARGGLYISVLTHPTTGGVTASFASLGDIMLAEPGALIGFAGPRVIEQTIGEKLPAGFQRSEFQYEHGFVDKVVPRTEMRETLAQLLRLHAMIKDILQQLAPLDEKIAALRGDPADENMTDITNHAAELAELSAQEDALLSGCGALTAEDRVFLARHPERPHIDEIVDALFTDFFEQCGDRQCKEDAAILGGVALFHGQPVTVIGHRKGSTLEENLRCNFGMPGPEGYRKALRLMKQAEKFDRPIITFIDTPGAYPGKDAEERGQGEAIARNLMEMSGLTVPVIAVVTGEGSSGGALALGVANRILMLENAVYSVLSPEGFASILWKDSSRSGEACEIMKLTAQDLYKDGIVEEIIPEPVGGAQRAHGVLFGNLDEALQRQLRSLARMNGRQLAEQRYQKFRQIGEMRKAMKGLRLIATGGALPGRTVTNEELSRTVDTSDEWITTRTGIRTRHYCTEGENAATLAIAAAKQALQRSGLAPADIACCVCATLSAPDATPSVACQVQAALALPENRPALDVNAACSGFLYGTAVARGLLATLGGRYALVIGTEALSRLMDPADRSTCVLFGDGAGAAVFELTDTSAPFAITLGARGDAAIHAGGPSRAGSAPISMDGRAVFRFAVDALPKCLHTVLDETGLTLDNLDWVVCHQANSRIIDHCVKALHADGAKFYKNMDRHGNTSAASIPVALNELAESGQLHPGQTLACIGFGGGLTWGGMIVEYKGMKLLNEILGTKYPIIQGGMANIATGEFAAACSNAGALGIIGAGGMNADTLRQNIRRCRELTDKPFGVNIMLMHPQADAFAQIVVEEKVAVVTTGAGNPGKYVSMWKAAGIKVIPVVAAAVLARHLEPLGIDAVIAEGTESGGHVGEMTTMALVPQVVDAVSVPVIAAGGIADGRQLAAALALGACGVQVGTCLLASEECPIHPNYKAALLKAGDSDTIVTGRTVGAPVRVLKNRMSREYVRQEKAGADKMELEKYTLGSLRRAVFEGDTVSGSLMAGQVAGMLHEVRPVADILADLWQGGRQRIAALNTECMLTLGGKPLQVPILQGGMGVGVSLGGLAGAVAACGGMGCISTADAGYREPDFARDPAAANHRALTAEIQKAKAIAGGMGLVAINAMVATRDYVEAIRTAVAAGVDAVVSGAGLPLELPGIVGTKEVAIAPIVSSARAAKLILRRWAKGFDRTADFVVIEGCKAGGHLGFAEEDLLADRCQTLDEILPGVLAEVKPYEEQYGHAIPVFVAGGVYTGADMAHFTKLGAAGVQLATRLIPTYECDASQTYKDVLLAAKPEDVRIIHSPVGMPGRALNTPLVQALAEGKRFPPKHCARCLKTCDPAAVPYCITHALIEAVKGNVEEGLFFCGENVGRLDRMRTVRELMDELVTEWRQNLMKLAVLYAGQGAQHPGMGKEFYEASPAFRAAFDSAALDFDLHRVCFEDPDGVLNQTEYTQPCMVAFACGVTAVLAEKGVKPAYLAGLSLGEYSALQAAGVFTAKQAIELTAFRGKAMAEAAKGLDCGMTAVLGLDREKLSACCEQAAAAGCVQICNYNCPGQLVIGGEKAAVEQAAALAKEAGARRCIPLKVSGPFHTKLMAPAGDALAQRFAGENFGTMETPVLFNCLGHEKAETDSIPQLLVKQVQSSVYMEDTLRRLGELGVDHILEVGPGNALSGFVKKTLPGVVCTAVETPEQLDAVLTAWKEAEMSEEKLTRAAIVTGGSRGIGRAVCVALAKQGCNVVVNYCHGAEPAGQTAALCRAEGVQAVTVQADVSTAEGCKALFDAAAEAFGRVDVLVNNAGITRDNLILRLTEQDFEAVLDTNLKSAFLCCKEAARRMVRQRYGRIVNLSSVVALRGNAGQTNYAASKAGLIGLTKSLARELAARNVTVNAVAPGFIDTDMTAVLPEAVRTGMTQGIPAGRAGQPEDVAQAVAFFAAEQSSYLTGQVLCVDGGMAMMEKRRVVITGLGTVNPLGNNVADSWAAARAGKCGIGPITQFDTTDFKCKLAGEVKDFDPETVVDKKEVRKMARFTLLALGAAAEAIADSGLDTEAEGKDIGVILSSGIGGLPTIEEQHARGEEKGMEKVSPYFVPMAIANMAAAQVAIRFGLKGMCTCPVTACAGGTNAVGDAFHRIRDGYEPVMVCGGAESCISPLGIGGFTSMKALSTATDPDAASLPFDARRGGFVMGEGSGVLVLEELEHARARGAHIYAEVVGYGANCDAYHFTAPAPGGAGAIDCMKLTLVDADIAPEQVDHINAHGTGTHMNDACETAAIHAVFGAHAKEMTVVSTKSMTGHLLGGAGGIEAVFTALALRDQFAPPTIHYAQPDPECDLDYVPNTGRQQEMQYALSNSLGFGGHNACIALRRWEGMAEPRTVRENANTLSSVQIAEILPHRYPFALVDRVLDYEPGQWAIGRKCVTRNEEFFNGHFPAQPVMPGVLLLEALAQTGAVAALSLPENKGKLALFGGIKSARFRKQVTPGDVLTLHCELVQQHGAVGVGKASAWVDGKCAVTAELTFVLTDAAEMTPQIIAHRGASYLAPENTLTAFKKAMEIGADGVEMDVQQTIDAGLVIHHDYMIDLHTDISGKIYDMTMGDLKELDFGSWKGAIFQDEKIATLQEAMELCRQMPGCTVHLELKSTMDNDPDFVPRVLEVLQQTKMVEQVILVSFNHALLRQAKQLLPELRVGALVYGELESMLLPPPIIWKDLGLTNGIDDMDAMDAALPESAADEENCSWMTRWMSDKVSMLRANFPGESLNEIYKNLLSQRDLPAYISSLDFVPEWVSCEYHTAYKNAGFIDKLHEMGIKVSLWTVDTEDSVRSLLRTSADAYITNRPDRVREWMEKEQAATAPTETATAESAPTAEADAGTAAAEMGKFPKGFLWGGATAANQCEGAWQADGKGLATVDVTPFGPDRFPVATGYMEMLGCDDAHFYPSHEAIDLYHHYKEDIALFAEMGFKCFRLSIAWTRILPNGDDAQPNEAGLAFYDSIFDECHKYGIEPLVTICHFDTPIALIKKYGGWKDRRMVDAYVHYCEVLFDRFKGKVKYWLTFNEINMLLHLSFTGAGLVFHPGENVEQVKYQAAHHELVASAKAVKLAHEKMPDAMVGCMLAAGQFYPRTCAPEDVRAAQEADRDNYFFTDVQVRGAYPVWAKKRMERAGVQLHTQPEDDRTLREGTVDFVSFSYYSSRCITVDKELMAAENAEGNAVSASVKNPYLKVSEWGWAIDPVGLRVTLNTIYDRYEKPMFIVENGLGAVDTVEPDGSIHDSYRIDYLRAHIEEMEKAVNEDGLPLMGYTTWGPIDLVSASTGEMKKRYGFIYVDKDNDGNGTLARSRKDSFYWYKKVIASDGEDLTMIPQPAALVHDCILQRCVHLGIKYDFYRQNAEISYCFLRTFHDKNTKLACFSFILFLLNRAAVWMTEFKPIKEGKVREIYDNGDSLIMVATDRISAFDVILKNKVTKKGTVLTQMSKFWFDYTRDLLPNHMLSVDVQDMPEFFRQPQFTGNSMMCRKLTMLPIECIVRGYITGSGWASYQKTGKVCGIQLPEGLQESDKLPEPIYTPSTKAEIGDHDENISYEQSIDVLEKQFPGHGLEYATKLRDYTIALYKKCAEYALSRGIIIADTKFEFGLDEDGNVVLGDEMLTPDSSRFWPLEGYEPGHSQPSFDKQFVRDWLKANPDSNYDLPQDVIDKTIAKYLEAYELLTGKKLMCTQHPIEEPCKLDPPWEGPQVIPAQLHRVDNLIFRRLNQFSRANGVEQTTPMHGWIIEYLYRHRDEPVFQRDIEREFSITRSTVTNILQLMERKGYIQRLSVPQDARLKQLVLTEEGIQRHEKTLLSFHQTDDYVAGLLTEEENAELLRLLNKLREALKMIKKLVSHLGEYKAASIKTPLFAALEAIMDVLLPTIMAFIIDQGIEKGDMNAIIRYGLLTFLVAAIALVLGVLAGKYAAEASTGFAGNLRDAMYENIQHYSFSNIDKFSTAGLVTRMTTDVTNVQNAFQMILRMCVRAPVHLVFAMFMAVVIGGPLSLVFVVAVAFLVAVLAAIMIPTFHIFDRVFKNYDNLNASVQENVSAIRVVKSFVREGFENEKYTAACESLYKQFVNAESRLSFNNPAMLVAVYGCNIALSWFGAKYVLHGAITTGQLNALFGYIMNILMALMMLSTAFVMIAMSAASAKRIVEVLDEHTDLPPAKQPVQQVADGSIQFDHVTFKYKHGSGQPVLNDISFTIQPGETLGIIGGTGSAKSSLVQLIPRLYDAESGTVRVGGVDVRDYNLDVLRREVSMVLQKNVLFSGTILDNLRWGDANATEEECIRMAKLACADEFIQRFPDKYNTWIEQGGSNVSGGQKQRLTIARALLRKPKVLILDDSTSAVDTATDAKIRKAFREEIPGTTKIIIAQRISSVQDADRILVLENGQINGLGTHAELLATNAIYQEVYNSQTQGGGDFDKQGGAQMAVKEVHGPGPRGARGPRPKVENPGKLLKRIMDEVFRNYLPHCILVLVCIVVSALANVQASLFLQTLMDDYIVPMTRQQNPSFAPLAGALVRMCCIYLVGILAAWANARIMVNVTQGTLRNLRTKLFTHMESLPIRYFDTHPHGDIMSVYTNDVDTLRQMLSQSIPQLVSSVITIVSVFFSMCMLSWQLTIVTMLMVALMLFCSKQIAKSSSKYFIQQQRDLGKVNGYIEEMMEGQKVVKVFTHEQQTLAGFRELNDQLKESAKQANAFSNIMMPVNAQLGNISYAICALTGAAMAVGGVGSMTLGTVVAFLSLNKGFNMPISQVSMQANSVIMALAGAERIFKMMDEPSETDEGYVTLVNAKYDRNDQLVETAERTGLWAWKHPHHDGTTTYHKLAGDITFTDVDFGYVPEKTVLHDINLYGRPGQKIAFVGSTGAGKTTITNLINRFYDIQDGKIRYDGINIHKIKKADLRRSLGIVLQDTHLFTGTVMENIRYGRLEATDEECIAAARLANADGFIKRLPEGYNTMLTGDGANLSQGQRQLLAIARAAVADPPVLILDEATSSIDTRTEALVQRGMDGLMYGRTSFVIAHRLSTVRNADCIVVLEQGRIIERGSHDELIAKKGKYYQLYTGNLAENMYTVERTILNGRRVRFGYLQRKIIFIFAILENLRIFQNCFFMGIKKSRRTAAWLCGGFVRRWEIVMHPLTEYPRPTMRRDSYENLNGLWQYAITASAQRPAGWDGEILVPYAPECRTSGVGRILQPGQWLHYHRYFAPPAGTGGRVLLHFGAVDYACAVQVNGHLVGGHRGGYWPFTLDITAQLNGTGRNSLWVAVQDPTGHGTQARGKQTLQPGGMFYPAQSGIWQTVWLERVPENYIQSLTVTPDYDARTVTVKAHTSAPGGAANLWAVVRAGGVTIAEDWGGDEADQDGEVTLHIAKEHFFPWSPDTPFLYDLTVGTTQGEEEQFDTVHSYFALRKWSCASDEKGVLRFCLNEKPILLNGLLDQGYWPEGLYTPPSDAAVERELSEVKALGYNLLRKHAKIEPQRWYYHCDRLGLVVWQDMVNGGSKYNLWFVTYLTNVLQPLMRRLPDKAALWGLLSRGSESSREEYRRELEDTVQALRCHPCVGCWVPFNEGWGQYDAAGAVQAIRALDDTRLVDEASGWYDQGGGDVYSLHNYFYPLRVRPQTRTVALSEYGGIAWPMPGHEPPRKTYGYGTAKSREELTARYKKMQLGTVLPQLQKGLSALVYTQLTDVEDEVNGLFTYDRTAIKPDANAVRSVNAALAAEFARVVKMARSAERSKRIFTKGAVAGNAVCRCNPSREKAILENPQIFQNCKYKNIFSAEDGMELSRRDFMRNTAAFAAVASVLGTSGIAFAADADQNCLVKVDSPDRAELAKRFKAGSAAGVEYYAYNPRRYAPTLKGRLPLIVFLHGEDGVGPNGTQLTANDGATFYISDEMIRKNPTYLFAPQCPGKNWTDPDTVTALKSAIDSYVAAHRIDPDRIYIEGMSMGGTGVWNMILSYPYYFAAAIPMCGMVPAQWYTVPGAFEAIKNTPVWAYHCKDDPEMPEAETAKAVQALKDAGCSCVKYEGFTAGSMPEPHKVWERVYSIGTPYNWMFTQSLTRTQHGKLNPNMMFSHYPVKYNITRVMDFGMDTLWVMDLGKEALIIDTAMGGSGAADLYAYLRENVLTNPDAELDILLTHKHGDHILGIPSLLKSGKVRRTYIHPDDQEGLLSSMQKFFGLTAEDLKLVNIVDGDTVRIGSEELEVVDVPGHTKGSVVFFYKDYIFTGDAVGSGDLFMMEAATDTYLPGLEHFMAEVLLRNEDVDYELLTGHWENLNPFSVEYLRHMLILVKGVIRGDIPIGYYTRKPGRWAGYLDANIFYPYAVFSYENEKMKKKLLALVCALALTVSLVGCALSTPDTVGKIGDFEVTSGLYLLAQYDAYQQAAQLADSEQDTSKVNSFLKATITTDADTGETAVVKDYVAQKTLETLQTLAAVDARFTELGGELTEEQKSAADSYAQQLMDNYGDAYTANGIGLETLKLFQQLQYKQTLLLDLVYGKDGETPVEDGELTEHLDSTMYEIGFITVPLYNTSTFAFASDDQKAEMLSLAQKAADSYNAAAPEDTSSQLAAFNSIASSALTDICAVLDAEVPSTSTLQTDLLGESDLTDAFTQEGAADTLRGLAYGQAAAIQYTGYAIMLAVRLDPLSVSTLDALRSQILSDMKGEELNDALAAYGAQLDSTLSSSAMSKLPASKIVNATSANSMYEALLKATPEYQKVAASFGSAGPAALFGLPPAGRALLYAALQKDLDRVLCIVTPGEAEATHFADDLKALGLTAAVFPPRDFMLRPVEGAGREYEYRRLSVLGALAGGRLQAVCVPAEALLQYTVPRAEFIQNTLTLKPGMVYNREALVARLFAAGYVRRSQVDGPGQFSVRGDIVDIYAPDMRQPARVEYWDDEIDSMSSFDLLTQRRDGALEKIYLSPAREVLFGSTAETAEALRSAIKKARGKHRTALEKATEADLSQLDSGLMPEAMDKYYGIRYPAPATLLDHLDAPLFILDEVGGIRDAQKATEFRRSEELTGLLEEGVLCPGLDVLYQTMDDLVIAAQNHSALLCENFLRGMNEFKLKDLINAEAFAAPNWNGDLASLREDLDPLIAQGYAVTLFAGTPKGAAALTRDLADKGYAVSMSRDVRPAKGILQVLPGHLTAGCTFPFAHTAVLSSRRHGLDEEAAAEAKKRKKNKNALSSLSDIKPGDYVVHQSHGIGMYAGIQRLEVQGATKDYLKVQYSGSDVLYVPVTQLDLLSRYTAPGDEEKVKLAKLGGTEWQRTRAKVKKATEEMAQELIELYARRRQATGYAFPPDGDWQRDFETRFDYDETDDQLHATAEIKQDMEKGYPMDRLLCGDVGVGKTEVALRAAFKCIMGGKQCALLAPTTLLAWQHYNTLLSRMEAFPVKIGMLSRFRTAKQQKETLRGLQAGSVDIVVGTHRLLSKDVKFHDLGLVIIDEEQRFGVKHKEKLKENFIGVDMLTLSATPIPRTLNMAMSGIRDLSTIEQPPIERQPVETFVLEYNDVILAEAMKKELARGGQVYYLHNRVDNIEACAAHVSQMVPGARVGIAHGKMTEEELNPVWQHLLNGEIDILVCTTLIETGIDVRNCNTLIIEDADRMGLAQLYQIRGRVGRSGRKAYAYFTFRRDKTLTDIAQKRLSAIREFTAFGSGFRIAMRDLQIRGAGSLLGHSQHGHMEAVGYDLYVKMLGQAIARARGEPVQRDKSDCLVDLRVDAFIPEKYIPDGAGRIEAYKRIAAIQTPEDAADVLDELIDRYGDPPPSVSDLVNVSLVRVQAAAVGVYEVTQKKDTLVLNLETLDLAMIRGLLQAFNGRVTAGAGTKPYLSVVLQPDEKPLELLQNILKAMADILTGTEREKAPQTGGAGTRKRDMNENDIWLIAGLGNPEAKYDGTRHNAGFAALDALADKWNISVGKTKFQGLWGQGEVDGHKVVLLKPLTYMNLSGDSIAPMAGFFKIPADHVLVLCDDITQAPGKLRIRPSGSAGGHNGLKSIIARLGGENFPRIRIGIGAKPHPDYDLAAWVLGKFPPEDAKAIADRYADLEAAAKLIMDGKLSLAQSKYNGMKSESFRKQALCLVLFFAAVAAVFALTRLRSDPAKKQAEFVVQQLLSCSSAVEQAVDAAAPAGSEPGLAAVDTDGLYAFLQAQLGDATTADCLNKIMANRLPTRITALAGQSGDKLVPADLTLKKHAGAENCYDFSAALLTATDSTAAAQVSGTITMVKEDGRWKASAITLNLMQNSISEQARAAALAQLDAAEAAREDILVQHIANGVVIDSRTVQIDPEVVIAPGAVILAGTILRGKTVIGAGCVIGPNTLIEDSTVDEGTAVNASQIYGSHIGPHNNIGPFTHVRVNTVTDYGVHLGAYVETKNSNFARGNTVSHLTYIGDSDVGKYCNFGCGTVTCNYDGKDKFRTQIGDYCFIGCNTNLVAPVKVGDGAYTAAGSTITKDVPAQALGIARERQTNLDGWAEPKMEAYIAKKQKLENEQSKMSKKYLYYFSEGNDAFGGDKVTMKNTLGGKGAGLAEMTAAGMPVPQGFTITTDACTQYYADGRQINDEITADIFEHLKGLEKITGKKFGDNTNPLLVSVRSGARQSMPGMMDTILNLGLNDEAVEGLAKKTGNTRFAYDCYRRFVQMFADVVMMVPKSLFEVEIDKMKEAKGVKNDVDLTADDLKELVGTFKKIYEENEGRPFPQDPRDQLIEAVKAVFRSWDNPRANVYRKMNEIPYEWGTAVNVQQMAFGNSGDRSGTGVAFTRDPATGAKKLMGEYLINAQGEDVVAGVRTPSPISHLKDQMPEVYDQFVEIATRLENYFRDMQDMEFTIEDGHLYMLQTRNGKRTAQAALQIACDLVDEGMITEQEAVLRVEPKQLDTLLHPQFDAAALKAAEVVGKGLAASPGSACGQIVFTAEEAEEMVKSGKMKKVVLVRLETSPEDIVGMQVSQGILTVRGGMTSHAAVVARGMGTCCVSGCGNDNEVKIDEEAKTFEINGHKFVEGDWISIDGSTGNIYGEQVATVAATGNKNFNRFMGWADAARQLLVMTNADNPRDAQQAVDLGAEGIGLCRTEHMFFAEDRIKAVREMICARTVEEREAALAKVEPFQQGDFEAMYRIMGERPMTIRYLDPPLHEFLPTKDEDIKELAADMGMTYEDLKNVVASLHEFNPMMGHRGCRLAVTYPEIAAMQTRAVIKAALNVSAETGHVITPHIMIPLVGEVKELKFVKDVVVKVADELIAAAGVDMKYQVGTMIEIPRAALTAGEIAKEAEFFSFGTNDLTQMTFGFSRDDAAKFLGAYYENKIYESDPFQHLDQVGVGKLVKMAAHDGRETRPDLGLGICGEHGGDPTSVEFCHNVGLDYVSCSPFRVPIARLAAAQAAIKNPRAMNITQRMYFGQFPLDKDRDRRIVFYGRVSTQHEAQVDALGNQMQWYDDQLRYHPNWQVVDRYIDEGITGTSAKKRPAFMKMLSDAKCGKFDLIVTREVCRFARNTVDTLQLTRELRNFGVEVFFVSDNIWTMDGDGELRLSIMATMAQEESRKISERVLAGQKISRQNGVLYGSGNIIGYDRDKVNRTYVINEEQAATIRMVFTLYSQGYGEKAIVNELSRLGRKDGHGNVSWSCTKISRILRNATYMGYICYNKSKVNNYLEKKRINNLDETSFVYVKGNFEPIVSEALWHECERIRKSRIVNLRLPDGETRRKGIDSTKYLWVAKLRCRCGSSYRIFNWRKLKDGTPVFGYQCNMRTVNPTRSFVLEHNMTQQLSCDAISIPEWKLELMAKKIFEKVWGNQNKAILRACKMIESCQNGKAATRMSAAPIQGQIEKIKKRKLNYAAMRADGELPREEYQALCKQADDEIARLEQELKALSPAPEPQTVSSDMKAIYDFLSQKVDVHGARLAPELIDQFIEVVTPIADYSYRWKLNTGCKKSKEERTNLMAVSEKPILTFTIDFETAKRYREANKMPHQFRRAAWTDLTVEVYLMTATVYATKDFGFLRGEIYYADLDPHYGSEQGGKRPVIVIQNNTGNKFAPTVIVAAVTSKVTKKPNQPTHVLIDRNPAFSRPSMVLLEQIFTIDKERIQRLLGQTTPDEMYQINEVLMNSLDLNGGRMKNMNCVSTMPEIMPEITDEAIIEALFAQRPYEEKVINSAFLEIPAEYQRKLNIPNVEKMSAEFTELIANPPKVSYRDGHYFVFDGQHTIVTRRAMNGGQDLPIICKVYEGLTEEEEAMLFSRQTGVSTPLTAGAELRAALVGKDPESLAFVKATESTGLQLGLDNYRAPWKIICIRTAFKEYKAYGADLYKEALTMLAKGWEGDPNSLRSGILQGMVRFVALYQGEYDPERLVKRLQTIHPMTLVRDEKSLSGTVSYKYMMLILRTYNGASRRFNLPIKQMMNLNALKIDPEFQGKIPPLTFEELNQLEANILRDGRIINPIIVWRGLIVDGHNRFTIAKKHPEIPFTTHEKAFANRYEAIIWICKNQLGRRNLTQEQKKYLIGKQYEAEKCANGGDRKSPAAKSGYGKRNLIGAPKTCYKVAAESGVGRTYVIEAEHYAKGLDAAEEAVPGTRQKVLSGEVKPTAAEIASVARAPPEERPALVAEICKPKDQKKTAMTRTTPSLAAKPLSDSSTSEEECTDEELVHTPAPQEQTFPQRVNEPLKIDRQQILEIANNRYHVKQLANGAAMLCEVSGAANSMMRRWESVFREYPDILSDAENRASVGRTIQKLRDYLKNLEDKMEELLMSRTFTHKTDESTLTTLCPRCLNAFRNTRGIRVRRADPYQLTKEPCTYCQTNFGYDYYIQPTSPKSSYFKKGRFDDESECAMFHFCKKYDKIEIFQKSFLSTKTKNAPLNKQRNAACPEGRDFIMMYYDQFNTGKRIQKLRRERYLTQEELAVRLNVSDRHLCSLESGEYIPSIDLFIEIAAFFDVTLDHLIMGKSLSDQEESLRNKLQQKRLTNQKLRLKLQRIMQKLSAIAEELMILATDEDTKVKDAVALRFKELCEERNISPNALAVRSGVTPSTVYSMLDSSQQSVTVPTVKKLCDGLGITLVDFFNASIFTAIDQEIRMFLCTAHRIFKNDIPEILPRKSTDRKTRKGILHLVNGRYHVFDKSCYFNHSILPLNYHMARRGENIRKRSDGRWEGRYIKGRSADGKPRWGYVYGATYTEVREISARKKAEYGIYNLNSTDITFSEISEQWLYSVRQGVKESTFAHYQYTLRHYLQPVFGNFKVSALSEKILEQGLLAVITPANGKQKPLGVTMAQECLSMLRRICKYAAHFHLIRPLEITVKLPQKSSKVLLPFTIEEQKKLQSFVMDSPTPRKIGLLLGFQLGLRIGEICGLKWGDFDLSAGTVTIQRTVTRISCGNGHTKVVVQSPKTQNSHREIPIPKSLLRVLKKLSEDFSSGTWFLSGNEEKPVEPRCYRKSIHGYLKKACVHQAHPHALRHTFATTCLQAHCDIKTLSELLGHADAAVTLKKYVHSDMTRKRREINRVFENFMREGVNKVALCLFEHNEKAYHAAVRMMEQYGKAAIVHPTGTGKSYIAFKLIEDNPEKVVIWLSPSEYIFKTQLESLKRNDPDFPLANVLFYTYAKLMCCTQAQLEKIAAQKPAYIILDEFHRAGAECWGESTVALLKLCPEAKLLGLTATNIRYLDNNRDMAEELFDGHTASDMTLGEAVVRGILPAPKYVTTVYQYQKALAKYQARVDNLRTPGIQDANQKYLDALRRALEQADGLDRVFAHHITNKSGKYIVFCANKEHMDEMVSHVPEWFAGVNPDVVVYEAYSDDPNTDKAFADFKTDTSDRLKLLFCIDMLNEGVHVEGISGVILFRPTISPIIYKQQIGRALTAGDNTTPLILDVVNNFEGLTSISGLQGEMQEAVHRLYANGEGDRIVTERFEVIEQVHDCRVLFEQLQASLSSGWEHYFSEASIYYAEHGNLNVPKLYTTPGGLSLGVWLVTQRRVREGQIQGILTEQQIQRLDSIGMVWGNRKEIAWQHGFEVAKKYHDTYGNLMVPGKYVDPDGYPLGQWIIKTRQQKLNGRLKEERIAQLDEIGMVWNIFDAKWEKAYALAAAYYEENGNLNIPRSYVTAAGERLGQWVESQQWAYPKGKLTEEQVERLSRIGMYWGNRNDRKWNEGYQEAKRYFDAHGDLNVPAEYVSPGGYNLGNWVKRQRYTRQNPEKSGAVLTEERIAKLDEIGMRWGKSNPKHPSKQAAQAERVTAKAGMATNTVGIDKEVEVDRKENLRDHRLYWIGRRTQDVILSSLALVVLSPVMLATAIAIVVDDPSAGPVFSQERIGRNGKPFKFYKFRSMCPNAEAKLDDLLDQNEMDGPVFKIKDDPRITRVGKFIRKTSIDELPQLWNILKGDMSIVGPRPALPREVEQYGDYEKQRLYVTPGLSCYWQIAPHRNDLSFEEWMDLDVKYVKERSFWVDWKIIFKTFKVCLLGRGEMGKKKKILMVHNFYQIGGGEHTVFKNEVELLRDNGHEVIEYTRSNDELKSDKWKLLFLPFTTVWSLRTYIEIRKLIKNEQIDVVHCHNTFPLISPSVYYAARSMKVPVVQTIHNFRLLCPNGSFYCKGKVCEKCRENGNFKEAIKNKCYRNSTLGTIIVAAMLTINRKLGIYKKISYIFLTEFNKSKFDKLIDINSNQVFVKPNFVSRKGEPSKGAHKRVFIFASRLEENKGIKLLLELWKLLPKDYCLHIYGDGTLKNFVEENVKENISFYGFTPQKTIFEDLSTATALVFPSIWYEGFPMILAEAMAIGCPVVSTNIGNAGDILVNSKGGTIFEPDNPDTFINAIEDVLQNNEIYQKNALTYYNKTLSKDKNYALQNDIYEHLFGGRVRTYIYAGRLDKGKGILKLLNEWINLPGTYVLEVYGEGECAADVRKLAAKYPNIHLNGFCPQKELFNSLKSAVALITPYIWYEGYPMNIAECFSMGVPVVSTSIGNAGDLVSKSNAGTLFDFEVDGSFRKALDAVYEQRTKFSFNAYNYYLCNQTPASNYERLNKIYDTLMIHCKKIKNIPARVNIIGVPISVVNMESCISFLLSNWDAVHGNYVCVSNVHTTVMAHDDPQYYKVQAESLLSVPDGKPLSVIGRKKFPQMNRVTGPDLMRRLFEESKEKKIRHYFYGTTQENINALLEKIQKEYPWVEVVGCEPSVFRPLSEEEENALIARINQTNPDIVWVALGAPRQEEFCYKMQGKINGLMIGVGGAFNVVSGVIDEAPQWVQDISMEWFYRFMKEPKRLFRRYLVTNSKFIWLSLLNEHTKIRMKQLKVKIHTHPIYIFWMLKIIFDMFYQLKMLTVIITAFAILLLIIAITKRFPLKPCISDTIVILIALMFTGSWLKSPELYLDYLKIISSLLLYFLGRFYVKDIDTVWESLTSSLLFALVINLIVCLAGKGTIVWGSAVTYRGMYFFKTDFAVMLCYFLITWIYNKKMEKSDFIPLAIAVVLIVLCNARIIYLCTIVALFIFFQYRKNKKIISFKNVLMLGCAFLVCIYALRFVSNTKFFQDRGLLSLHFDKLSDLMNASNTQGRNEIWTLLLTAFNRQNIFTKIFGAAMNFNQIFGYSGLNEHNTYVKVLINTGYCGLVLFALLFFIAIKEINDTPDRKLSCYTLSVLMVFLIVGFSVPTILYTNCSWIPLFMIGGCISSAQENYNVEVVETMKSNVIKNTIMLYGMSIAKIVFPLLTLPYLTRVLSVESYGVVSYVKAVMQYMQLVVDFGFMLSGTKDIVNAKNDHEKLEKEVGDILLARVLLAAAAFVALLGMIAVIPLLRANIGYTLLAFVTVFLSVFLFDYFFRGIEKMQVITLRFVAMRGIATALTFVFVHSDKDILFVPLLDAVGSLVAVILVFVELKKENIKIHFSGVSTAWKKLKNSFVYFASNMATTAFGALNTLLIGAFLPATEVAYWSVCMQLIGAVQTMYTPITDGIYPEMIKTKSWKFIKRLLMIFMPIVFAGSAFSIAVAPYVLQIVGGEQYIAATSLFRALVPVLIFSFPGIVLGWPTLGALDKAAQVTKTTILSAVVQVASLLLLIATGRFTVMWIAIFRCVTEFVLMASRGWYCWKYRREFCMFENNQVDKIHGFLKGWLLVSFFIFAINYIVVYRSAFIGVPLSDREETSCAFLLLAFGILSWILCAAVSIYKEVRSVCMLIEKVITNFSDVSLWAIALVVGYVLIGAILLLRLAWKRKHTKMENVTQNTPIEQSKEIYRESQNDTKSENSDATKYLPVPQEHVSIIEQKDFSHFYITLEHHLKAPSKFLDTLKDLWEEPNASTGMVATPEMFFSSQEFYGSCYDNLAHVEKKQNSVVKLREGTLINLNGKIYRVRKIEIQNKATSSSVRLDLEKLSVSNYSLEKRDNHYARLRRSNSMKQLNEEEVKIYQLGILNTVADFCEKNQIQYWLDCGTLLGAIRHKGYIPWDDDIDIGMLRPDFDRFMNIFNQANGRYKFICRELGNSFYYPYGKVLDTETVLYEPDENGMKISVNIDVFVYDNAPESNQKVAEMYKLGDWYTKLNAVQNGVVGTHGIIKDIVKTVGFEVLKIFPKGYFSKKIVDNSKKYADMNTSAVGNFTSVPRIVCEKDVFSSFIKVPFEGREYNAPVGYDKWLNAFYGDYMQLPPEEKRVSHHMYKAYQKMMMSKILTFGVYDYFHLGHLRLFKQCKNYGDYLIVAVQDGDYIKKYKPDSKILYTTAERVEMLESLRIVDKVVVYESVEPKFLESVDFDILALGEDHCGGRFDIVEQWCKEHGKKVVRLKRTKGICSSDIKNSLSEMSAFDNATLMITGGTGSFGSTVLKHFLDSDLKEIRIFSRDEKKQDDMRHELQAKHPENAKKVKFYIGDVRNPQSIRDAMPGVDYIFHAAALKQVPSCEFFPMQAVQTNIIGTDNVLHAAIDAGVKRVVCLSTDKAAYPINAMGISKAMMEHVIYANARVAAERGGTTICCTRYGNVMCSRGSVIPLFIDQIKAGNPITITDPNMTRFLMNLDEAVDLVLFAFQHANPGDLFIQKSDASTIGDLAKAVQQLFGDTGTNIIGTRHGEKLFETLMTREERLRSQDMGHYFRVAADNRDLNYDKFVVNGEVHTMADESYTSHNTTRLDVEGTVKKILTTEYVQNALKGMDGSNAGYYAIFYNNISEEEIQKYIDQLKNLGYAEEASASESISTGVLLRKDETWISIAYSEGGFGIRISVEKSMSERTEVSFDAALMMALRADAQKELDELPTPAQLKERYPDTSRWDARLKAALHKRRPVLKRVLVAAMTLVILTLGALAVSADFRKAVYTMIQKFLPIEMQLTYQVDGEPLEQLPNGYSDYYVPDGFERDREQEFERAENFLHVYSSKESGKGYTVRCSIIQPGQQSSFDNEHTTYENVKVGDADATLGTSASENGDTVYILSWEQGGVSNTIMGNISRDEIMKIAENVFMLAMYLAVLDDRSSEEQFIDVYNTYKRLVYHIAYKIMGDSYLAEDVLQEVFLYVAKNFSKIHRENCHELVAYLVSCSRSRAYDMLRKQREEPLEEIPDVPDDAPVPDDAVVSTDNIQHLTELIGQMKPMYRDPLRLLAMGYTNREIAESLGLTDEVVRMRLFRGRKLLWKELNSHEMMDMVRDAFATFEQRMVTEDKDGICYQRVSLDDVLPGEEQLRRIEAIADPYAMQPQSIMEEQESRRELYDGLKRLTQREQTYLLYRYGFTDGEEHPLIGTAIYFHLTKGRAQKTEEQAMDNLWLELPWWFIMSTLLRTRVKTPEAAKAAKDISLRRKPVYQGDLDDIEMYFMAAIKEIKKGIGSHYAEQEAMSKKVAEKMFTELTKGQDVQHPTITAEQLTDAMLDSVSGIEGATPEALEQLRSGLLGILQSAAEQENAHEADEMAQEYLPAPSNVRLADLMKEHNISQPELAKEIGCSKSTISRFISGAKGTLTHEQVLKIARLFNVSTDFLLGETNIPDRKNYDIAELGLSVEAAKNLYTGRVNAEVVNLLLENARFAELTYRIAQYFDPASRHRTPCLRHMSLYQTVKSAITVRQVGEMYGMEPDRHGMVCCPFHSDNHPSMMLNESYYYCFACGANGDAIDLTAKLFDLNPRQAAEKLINDFAFAKQCSPQWGLQVTERSCVSKMEGPRPDKLWLDPDKPPANAIALPPPKRGLTDEQWADIAYCLRVLTDYLDLLHDWRERYKPATPEEPHDPRFEEALHMTETIEHLTDCVAFGTPQQKAAAAAQLLSGSYLLMLEERTDRLALAKCAMKKNISRNPLWPDWYNGKKIDEVQFGRAFLEQWPLKCVNGTLYTLDGPVEDESEIKQRILENIEEYVTSGLSKKVTNILETIKLLAFSDPFPIEQDCIHLQNGVYHLPDGSFQESRLFCQNRLPVKYDPKAPSPDRWLTFLHELLDDADIPTLQEYLGYCLIPSTKGQKMMLIVGKGGEGKSRIGLVLKRLMGDAASNGSVQKVENNRFARADLERRLLMIDDDMDMNALPKTNYIKTIVTAEAKLDLERKGVQSYQRDIYARFLCFGNGALTSLYDHSDGFFRRQLILTTKDKPTDRTDDPFLVEKMCAELEGILLWCLEGLHRLVQNDFRFTVSERAAANVDTIKRSSNNVIDFMESEGYFRFKADYSISSKEFYDIYKQWCEDNACHSVSAIRFSAELRQNDRRYNLEATNNIYLPGGRRVRGFVGIEPLVHPCPMARNDGIDRTSVRNLAVSDKAVGNTQQHNEREKDSYRNPDIIPQRAAWNVHFKKPAASYTDLFSQLEAAGTISTRGLKPDATHYCELVFDVNSAYFDNHGGYEFAKQFYEDAYQAAVQIVGGEQYILSAVMHADEINRAMTEALGREVYHYHLHVVYVPVVEKQILWSKRCKDKALVGTVKETVMQVSRSKKWASKPLLDDAGKPVLQKSGKPVLKKSYSVLQDDFFHYMRNAGYTDVERGERGSTEEHLTVTQFKVQREQERLDTLTAQIDQKEQHLTQTNKTLSKTEKELAAVQKKVTLTKEALIHARDLDYIGKRTFLGNYSLTEEEFSKLKKQADHGYMMDVENRRLKEELSTAKKEAVXXXXXXXXXXXXXXXXXXXXXXXXXXKPQAWAGYGTLIFGGYHLNKKKKSNKSGYPDEAIKTLARCFYPSMVEFFNSEEGQREYEEWLKEQETLQALPVAAMMKYDARACSFNMDTGCVELTLQDGRKISIDCTGVEDALNVTMVQQTELDYLIYNDPLGYADLILNGDPREYLKNVAGSHGLEDMKRGGRGTVSLLKKSEKRWLTKPFSHAKINKSSGARMHNNMESTISAAPQISIDREKTLRSHRRYWVLRHAQDIVFSLLALILLAPLALLISLAIVLDSPGDGAIFRQRRVGRDGKLFWLYKFRTMCPDAEEQLNELLSQNQMDGPVFKIKGDPRITRVGRFLRKTSLDELPQLLNVLQGDMSIVGPRPALPREVELYSDYQRQRLYVTPGLSCYWQIAPHRNEMSFDEWVALDLKYIQERSFWVDWKIIFLTVRAMLMKYGEMRSDNVTKGSERAPNRSLFYALGYTPEELERPLIGVVSAYSEIVPGHMNLDKIAEAVKAGVQMAGGTPILIPAIGVCDGIAMGHVGMKYSLASRELICDSVETMLMAHQLDGLVLVPNCDKIVPGMVMAAVRMDVPAVVCSGGPMLAGTYGGEEVSLSKMFEAVGAYKAGMITDEQLEDCTCNCCPSCGSCSGMYTANSMNCLCEAIGIALPGNGTIPAVYSKRLQLAKHAGMAVMEMVRKGITARQIINERSIRNALTCDMALGCSTNTVLHLLAIAYEAGVPIDLKLFNEISAKTPNLCHLAPAGPTHMPDLYAAGGIPAVQAELAKKGLLDLDVPTVTGKTLGENIKGAHILNEKAIRPIENPYSETGGLQILWGNIAPDGCVVKRSAVAPEMQQHSGPARVFNSEEEAIAAIYAGKIVPGDVVVIRYEGPKGGPGMREMLNPTSALAGMKLDKTVALITDGRFSGASRGAAIGHVSPEAASGGPIGLIEEGDTISIDIPNASITLEVSDAVLAERKAKYVAPEPNIKTGWLSRYARMVTSANLGAVLKMAIKKYYDSDCNLGVLDGKTVAVIGFGSQGHAHSENLAESGVNVVVGLRKGSAHWAKASEFAATHDNFKVMEVEEAAKAGDVVMMLVPDELCADIYNTQVAPYMTEGKALAFAHGFNIHFKTITAPKNVDVIMIAPKGPGHIVRRLYTEGEGCPSLICVEQDYTGKAKDIALAYASGIGAGRAGILQTTFKEETETDLFGEQAVLCGGVSELIHAGFDTLVEAGYEPEMAYFETCHEMKLIVDLINEGGFSKMRYSISNTAEYGDYRTGKRLITEETRKEMKKVLTEIQDGTFASEFLTEMSPKGGRKVHFLAKRRMEAELPIEKVGAELRSMMSWLKKMESDQRRVISLLVDNQSGVLARVSSLFCRRGFNIDSLTVSATNDPAVSRITVTITSDEKALQQLVLQTERLEVTRQVFVLDSEKALERELLLLKVESDVHNRTELREIACIYKAKIIDLSPDSMVFELIGRPDKLDAFLKMFEGYNILEQCRTGVTALERGGMHQHIQKPPQEVRSVQLPPPGARRAMQLNGSQIFVEVLCEQGVDTLFGYPGGAVLNLYDELYKNADRITHVLTAHEQGAAHAADGYARATGRTGVVLATSGPGATNLVTGIATAYMDSVPMVAFTGNVPTSSIGKDGFQEAYIEGITVPITKHNFTVRRVEDLADTMRAAFRIAQSGRKGPVLVDIPKDVTAAVCEFTPKQPEPIRTVTTYNEEQVHWAADLINAAQRPLVYFGGGVRSAASCQPLRDLLHKAEIPATYTLMAAGVVPYGDPMNLGMLGMHGCYTSNRAVAECDVLIAVGTRFSDRVALNPKTFAKNATIIQIDIDASELGKNVDVDLSIVGDAAYVLNAMLPQIKPAKHPDWMTMIQSWQAQDYHPVSDPTRLMPHQVIGEVCNQCGPDAVYVTDVGQHQMWAAQYLRHTKSRGFITSGGLGTMGFGYGAAIGAQMALGRQQRVVMFTGDASFHMNLNEACTAVSYELPIITVIFNNSVLGMVRQWQTSFYGKRYSQTDPHRKTDFVKLADGFGLKGYRCTNLPEFQEAFADALQQKGPTWIECIIDKDEKVLPMIPGGGDINDIIMEMKLREWNAHLHGLVVFRALLNDPVVARLLDLTDRMEAGCSSYGPVCDAVAAFEAALFEYTTNWGSYLSNAVLEAETICVRQAAAGQLDALLQSALDSELQFLQQLCGLTLDELFQTAYSEQAQRPELAFLPRWQTCELDLAAAYAQRMSEVGKKGYGMFAKHHVFTVENGQLVPVKHPDPQRLSELPGYEKEREKVIANTKALLAGMPANNVLLYGDAGTGKSSAVKAIANEFASEGLRLVEVKKNQLYQIPDLMDKLAANPLKFILFIDDLSFTANDDNFAALKAILEGSVGGRAQNIAVYATSNRRHLIKETLSDRTGDDIHEADTRQELMSLSARFGLTVTFQRPEKARFETILEQLAKQHNIQMPTEQLLLKAEAFALRAGGRSPRVAKQFIEQCEAGVQKMKVVSTTNAPAAIGPYSQALDLGNMVFVSGQLPVDPATGTMADTVEQQAAQSLANLKAILAEAGLSMNNVVKTVIFLADINDFAAVNAEYAKAFAEPFPARSCVQVAAIPKGAKLEIECIAVRDMLTLDKIYHAAFVLKDVARKTDLIEAPKLSKDCQLYLKTENLQATGSFKVRGAYYKISQLSEEESAKGVIACSAGNHAQGVALAATRRGIRSIVCMPDGAPLMKVENTKNLGAEVCLVPGTYDEAHDKAVQLQKEYDMTFIHPYDDEQVIAGQGTIGLEILDQLPDVDAVVVPVGGGGLISGIAFAIKTLRPEVKVYGVQAEGAPSMYRSLHEHKYQTLKSASTFADGIQVKTPGELTYQLCEQYVDDIVTVTEDETAAAILSLMENQKLVAEGAGAVPVAAVLFHKLPVEGKKVACVISGGNIDVNILNRVITRGLVMSGRKANLTIALEDKPGQLKKVAEVVSRCGSNVVSVQHDGSDPNMPISSCFLKLTLETRDAAQIEQIRTELTKAGFQLVSERVMKNFAKRISALVLAVVVSAAVLCPAAFAAQLPSLPKDQCVVDDAGVLSSSTVQTITELNAQLESSCSGAQIGVLTVEYTGNDSTEEYATQAFNAWGIGSSSKNNGVLILLVMESAQYADGDYYLTYGDGFRNTTLAKQSSAIAQTMEDQFAAKNYDGAVTTCARNVANTIADIYGVSLSGGTGNGSTVQPGYQGGQSSGGSTLTDILTLVVSVVLLIVIIRSMAYVFASPCGWLWCFGGPRPPRGRRRGPHNPPPPPGGFYGGFGGMGGGSFGGGAGRGGFGGGFGGMGGGSSHGGGGGRGRMANADFSQNKQTAPGGFDAGSYREKAKPEQAVTLTPRQQKLAALEAKLPAALSTRAAALVLSVVVMLAAFFGFGSAKLRGKYNTARQWFTAGVAADNGYNLSEELTTRENTAANILTTASNTLGADSAEVLAAQTALNDFSACLQAVQNGGKSQSLTSLPYYQGSTMHALYQADQALGTAIDQLYAKLQEQADDPMKMGAVQGQYGQFNSAATIIGTLQYNTAVYEYQKDVGGFPASVLGALSGVKEVEPFAMADNTLNFDLDAPAVPTLTLDPTPAAVPQEEKPAAAPAPEAQVNLTPEEQAMVDQFAQKIDITNSQQVLQYGSACQKKIGDFSEAALSKVSTKDLGEVGDMITDLIGELKSFDANEEQQKGIMGFFKKKTSQLDALKTKYDKTETNVEKIQSMLEAHQVQLLKDIAMLDKMYELNMAYFKELSMYILAGKKKLADVRANELQQAMDKAKVSGLPEDAQAARDLADQCERFEKKLYDLELTRNISLQMGPQIRLLQNNNTMMAEKIQSTIVNTIPLWKNQMVLALGLAHSQQAMQAERAVTNMTNDLLKKNAEALKLGTIETAKESQRGIVDIETLQQTNKSLIETLDELNKIQSEGRAKRVAAEQELTRIEDELKTKMMEIRSMSKIIRTQKPSVLPFYAAALVFVVLCAVLPVYKLWALLVALGGAAVAFGVAKKNCPPRVVEHEVPFHTGVEDVDQMLTDIQQKLDTLHALNEALPDPQLSAAMTRMEKAGRSIVEAVEANPAKAKQVRRFANYYLPDAVNVLQQYAKLAKQGVRGENAAAIRAEVEHNAASIATAFENQLDALYAAESMDLSADLTVLQNMLKGQGLSKMSFAPVYDDQSRALILGTWPSPKSREMAFYYGHPQNRFWPLLAALTGEPLPVREDIAAKKQLLLRHGLALWDTLESCTITGASDASIRDVVPNDIAGLLRKAPIRAVFCNGATAYRIYTKYQQPLTGIPAVRLPSTSPANAACSPARLEEIWGAALADWIVKMQYKILASDYDNTLMPFGEAKPRPAVVKAVKKLQAAGGKFVLSTGRSYPGIRDKNQLGGIRYDYAITCNGACVVDRQGNVIAEHPLTSEEMYVLVDFCEDYNYPLQFNFRDAYYAYCEYEYLHTGYQMMNSPGLDCVDGEDQDRHLVDMPHAAFAAMPPQEVERFHEKYGYLGLHWMQTGAQNADGYCYYDIVRGGMDKGVGLADLCAQMGLTLADAVAVGDSANDVGMLKVAGLSACMANGTPDAKAAADRIIGDVREDGVAALIEELWFDGPRAEPSGKDFGSAWGNIESAGGSLMELFLDVLGETLVDTAKMLPFLFLAYLLIEYIEHRHGERIEALLAGGGRWGAVPGAVLGCVPQCGFSAIASNFYASRVITLGTLMAVYLATSDEAIPLLVSMPAYWDKLAVLMVIKVVYAIVVGFVLDFVLRGVLPKGLRGGYTGHADEVDCHEEHSDAEGNEKPIWQAALRHTLEIFVFIFAFSLVFGMIVEGVGEDVFAEMLGGMGFFQPVVAALVGLIPNCAASVLLTQLYVEGALRFSSLVAGLCTGAGVGLAVLWRANPSWKQNLFITGLTWAAGAFVGVAMQVVVAVFAMQDQYSRTQLLLGAEAMEKLHHARVAVFGIGGVGGYTVEALARSGVGALDLIDDDKVCLTNLNRQIIATRSTVGQYKVDVAEQRIHDIDPNIKVTTHRCFFGPETQDDFDFTQYDYVVDAIDTVTGKLALVMKCKEAGTPIICSMGAGNKMDPTRFEVTDIYKTSVCPLAKVMRIECRKRKIKHLKVVYSKEPVMTPIEDDSISCKNHCICPPGTQRKCTARRTVPGSNAFVPSVAGLIIGGEVVKDLVGFVPLKGMTTQNPANRPRALIAMSGGVDSSVAACLMQQAGYDCTGITMRLTHNETLGQSGYQTCCSEKDIEDAAEVAFALDMPYQVLDFTADFRAQIIEKFIRVYEAGGTPNPCIDCNKYMKFRHLLDWAEEHGMEYVVTGHYARVEQDAATGRWLLKKGLDEGKDQSYVLYNLTQEQLAHIRLPLGALHKTEVREIAQEHSFINAQKHDSQDICFVPDGDYARFMEQFTGKHYPAGDFLDRSGKVVGTHSGAVRYTLGQRKGLGLALGAPVYVCGKDMQANTVTVGPESELFDSIVYAEDVNWIAIPALTGPLRVTARTRYHQAEQQATVYPAENGFRLEFDQPQRAPTPGQAAVLYQGDVVLGGGTITRVEKMKLTLDPGAAALLDALHAAGYAAYAVGGCVRDSLLGRTAHDWDLCTSALPQQVMELFGTEQCIPTGLQHGTVTIKYGGQLYETTTFRTEGSYTDGRHPDAVQFVPDVREDLARRDFTINAMAYNAAEGLVDPFGGQKDLQNGLLRAVGEPQQRFTEDALRILRLYRFAARFGFTLDAATARAARQLAPHLDCISAERIQEELAKLLVAPQPGAYLEPAVLAVVLPELTPAALEAAKPVVDACPAGEENLPVRWAALLGTLGEADTRRVLKRLRCSNACIEETAVLVRETAGEGVCGSFLLGHESGHSIARPTACGSRVPPQRTVLGETPAHAPERASDIHLRRLLGRYGLCTVERLCALCAALRPQAAPACALAAQRARQLEADGVCCRVRQLAVNGRDLMAAGIPAGPALRRVLEALLDGVIRAEYPNEKPALLTAAQKIIASMLTITLLGTAATMPLPERALTAAVAECGGHSLLLDCGEGTQTAARRAGVNLMRADAICLTHYHGDHIFGLPGLLQTLGAQGRTRSLVLLGPEGLLEVWRAVYALTGPLPYAVKPLVCRAGQPVALDALSAGWPAGATLLPVATKHRVRSLGYRLDLPRAGRFDPEKARALGVPVTQWRLLQRGQAVPLAERMVQPAEVLGAPRKGLRFVFSGDSAPCPALEQAAQGADLLLCDATYALPEQQEQAAQWGHSTFGQSAALAAKAGAKRLWLVHYSPMVTDPEEHLAQAQSIFPAAECGFDGKRITLHYEENEEMQRDRRKRYSPARHPVLLRRVLLVLCILAVLWLGYSCMMPQLLFSARGTMIFVPDPPLRGMRHFIEPGSFSLAEQLALLDLADRMEADPAPYAHLCDGRILATLFYEPSTRTRLSFESAMLRLGGKTLGFAGAQLSSASKGETVADTARVVSNYADVIAMRHPKEGAPLRASMYARVPVINAGDGGHAHPSQTMIDLMTIRQRKGRLDHLTIGFCGDLKFGRTVHSLTAALSQFEGNRFVFISPEELRIPQYVKDETLTPLHQNYKETADLEAELPGLDVLYMTRIQQERFFNEEDYLRLKGCYALDEKLLQLAPPTMPVLHPLPRIDEIKPDVDNDPRAAYFDQVHNGVYIRMAIILALLGIPDPLTGKKVLESLMLTAVTGINWGDEGKGRVIDLLAENADIVARYQGGNNAGHTVVTEKGKFILNLLPSGILHPEVTCVLGTGMVIDLEHLAGEMEAIEARGVKVEPENLKLSDKATISMPWHKVQDGLEEDRLAKKGGAFGSTRRGIAYAYSDKYRKKTLRLGDLLHLDEERTQNRLHMILDAKNMELAGCYHQEPMSYDALLNWCRQQAAYFAPFICDVGAFLQQAHDSGKRIVLEAQLGAMRDIDYGIFPFTSSSNTLAAYAPLGAGIPNCKLDHVVGVLKAYSTCVGAGPFAAENAMGEAWNEKLRKAGGEYGAATGRPRRVGPFDCVASRYGLQCQGADKIALTKLDVLSSMKQIPVITGYKLDGVEVPRFDTLSDLDRVQPVVTLLPGWNKDISGCRSWTELPKEAKAYVEFLEKQLGHEIQFVSTGAEREKFVLKGEWLMSIIRACREYVKSILCIAAICFLHCRGCCPHPAQPSRKKRLQFRRAVLMYVDWEYYKIFYYVAKYQNFTRAARVLGNNQPNITHAMNRLESQLNCVLFIRSNRGVTLTPEGELLYSRIASAAVQIQDAEEELSATATLEHGAISISTTETALNIYLSEKLRAFHTEYPGIRLRISNHSTPQAVQAVRNGEVDFAIVTTPAEVENGLKMVELMPFYEVLVGGKTFTALASQTLSLKELAGYPLICLNEESMTRSFYRQFFLEHDAVLKPDTEAATTDQMLTLVKSELGLAFMPEPMAAPLLASGELVQLHLQEIIPSRSICLVYDHHRPLNTAARKFQQLLTKAGARSTEHKMKTKHHGQMSESFLTAVFLSLSGGLQDAYTYLFRGKVFANAQTGNIVLLSTNIMDGRWDKVLHYLVPLCAFALGVLAAEKMREHFQAMQRLHWRQLVVLGEVLLLFAVGFLPQSQNLLANAIVSFSCAMQVQAFRKVNGYAFASTMCIGDLRSGVEAFCIWRKSHEPHAKDRMVRYFGIIFLFALGAGLGSKSAAQLGGRAIWLSCCFLLVSFTLMFIREELEENPVIEKDLTAIRQETREIDRTLKQELQEEQRELTQSARKMKIAIPYENGQVFQHFGHSAQFKLYTAEEGRITGAEVVSTDGQGHGALVGFLVRNGVNVLLCGGIGGGAQMALAQAGIRLCGGITGDADSAAAAYLAGTLVFDPNARCTHHDHEESHSCGSHACHADKGGCTGSCHMLLSREKGAQESPRLRSNKSPSEAFKRQSGLRKQMEGLCPDKLRRLSMNQITTRYITENGACYEQYVITDPEAKTALTITPERGGMITSFTLDGEEFVWTRRPNFSECNRPRFGVPVLFPSCGNPDNGVHIFDGKAYPMETHGFADLCAWEVDSVGPDGVTLALESTPLTKFLYPFDFTLLLNYNLEGNKALVSLTVINEGSTDMPFSFGYHPYFTASKLENVEFDIKCATCSDNAKGEQPAAPEKITLTRKEGADNSVRLLTGVQFPMTLTDKGNGHKVTVDADETFENGVLWQQDAESFVCMEPWNGWANSVNEDGKHEVLEPDEAMTSEWSITIEKAMLGVNGVLLLTLLLYAAIIYGAVRLIKYFIRYGIDYYFQKLEQQPEQTEHKEMPQAIHISPIDNVVVALHPIAKGTLVEVDGLAVTALEDIPQGHKMAVKPIKNGENVIKYGFPIGHATADAAPGTWMHTHNVHTNLSGEVEYSYNPAPDLAPLPKVEPETFMGFRRKDGRAAIRNEIWIIPTVGCVNDIAKKIVADNQDLVTGSIEGLYTFTHPFGCSQTGHDHAQTRKLLAALVRHPNAAAVLVLHLGCENLQHDQFVEELGEYDHDRVKFLTCQDVEDEFAAARDILKELAAYAGQFERQPIPVSELVVGMKCGGSDGLSGITANPTIGRFSDMMGQRGGSTVLTEVPEMFGAEGFLMDRCINKEVFVKAEHMINGFKEYFISHNEVVYDNPSPGNKAGGITTLEDKSCGCVQKGGTAPIMDVIGYGDPVVTKGLNMLYGPGNDLVSATAMTAAGAHLILFSTGRGTPFSAPAPTLKISTNTPLAEKKGGWIDFNTGVIADGEKTIDEAAKDLLNLVIRVASGEQTKAEKHGFREISIFKDGVVLMETLNYKVLEGTGYNGYILKDAPVKVMQFGEGNFLRAFVDYFYDIANEKAGYNGKVKLVQPIGNFPQMADWINEQEGLYTLYLRGSEKGQKVDAKRVISCVSDCVCPYIDGKWDEVLALARSEDLETVVSNTTEAGIAYTKGDSQFDQVPPNSFPAKLTRVLFERYKAFNGAADKGLVILSCELIDNNGKELQKCCNNYAKDWDLEPAFIDWMNTANTFCSTLVDRIVPGRIRDPQELAALEEANGYHDAALDVGEVFGVWVIEGPAGLEDKLPFKKAGVNVMVVPDVTPYKKRKVRILNGAHTGFVLGAYLAGFDIVRDCMHNDTVRGFMNKMLHEEIIPTLPLDKKDLEDFASAVEDRFNNPFVNHELMSISLNSTSKWKARNMPSFLAYIEEQKQLPKCLTMSLAAYIAFYSNDIQERTADGLICKRPAGNTYKIQDDAWALDFYYAHKDDTAAQLVHAVLTNTQMWDQDLTKIEGLEAAVLADLEMIRTQGAEAAYKSCLMFCAMFLVQKWPFSAFPAVCTIPRVKFWQFFSCIHRRFPVYMKAFMDKDFMLQSATAQHLYHDYAAAMPICDYHCHIPPREIYENRRFENITQVWLGGRNPDGSYFGDHYKWRVMRSNGVPEEYITGDKPDRERFQKFAEALPMAIGNPMYHWTNLELHVFFGYDGVLNGDTAEEVWNLCNDKLQHDPKLTVRGLIEQSNVAFIGTTDDPIDDLYWHKKIKEDPTIKFTVAPSFRPDKALNINKPGFAEYMAKLAAVVGKEKLACIDCVTDALTKRIEFFAEMGCRASDHGLDYVPYREATKDEVNAIYQKVMKGESCTVEEAEKYQTYILIHLGKQYHRLGIAMQIHYNCLRGVNRKMNSLLGPDTGFDMINTATCGGEIAQLLSALNDTDECPKTIIYSLNPADDAQIGTILGCFQNSEVPGKIQHGSAWWFNDHKIGMEDQMIRLASLGLLGNFVGMLTDSRSFLSYTRHDYFRRILCNIIGQWVEDGEYPNDEKALEKIVKGICFDNAKRYFNLMNGLKEAFSRENLLKDLNFFALLNLGLVLTAVGIVYFKNPNHFAFGGTSGLSILLADLFPRINVGGFMWIINIVLVVLGFIFLGVKCMGWTIYSSFALSFFVSGCEWLYPSGVSLSGDAMLDLVFAVFLPALGAAIVFDIGASTGGTDIVALILAKYTSMEIGKALMVSDILIVLAAAVRFGMGTGLYCILGLIGKSFVVDGAIENIRLRKVCTIMTANPQPILDFIIHDMNRSATVEKAYGAYTHHELSVLVTVLTRRQALQLRNFLRENDPHSFITIVNSSEIIGKGFRSFNMADKNFLTDIIDADLAEGKVQQIHTRFPPEPNGYLHIGSAKAIYINWSIANQYGGKFNLRLDDTNPAREGEEYVNSIIEDLHWLGADPNGGIFYGSDYFDKCYEYAEKLITEGKAYVDDLTREEMREYRGSDAGKPSRPSPWRDRSPEENLDLFRRMRAGEFKEGEKTLRAKIDLASPNMNMRDPAIYRIKYAEHHRQGNKWCIYPMYDFAHPIQDAIEGITHSMCSLEFENHRPLYNWVIENIFGAEFPKQREFARLNMTNTVMSKRYLRELVEMGIVDGWDDPRMPTLCGLRRRGYTPTSIFTFVREAGISKSDNLIDMRQLEACIRSELDLTAQRRIAVLEPVKLVVDNYPADKTEYFDVANNPNREANDTTTRKVAFTRELWIDAEDFAEVPPPKFKRLTVDGEVRLMGAYIVKCTGVDKNADGSIAAIHCTADLETGNGNPADGRKVKGTIHWVSAAHCVDAEVRLYDKLFTEANMNAIPEGSDYKDYLNPESVTVRTGCKLEESLKDAKPGEKFQFVRTGFFTPDSKNPGVYNRVVTLRDSFKPAKMTAKMTRNILLMLVATVLMGIVLNLYIHNTGTVPAADNAAPLTDGSYTSSAQGCLSEVTVTVTVTGGKVTAVQVDASAETPELGGKAAETLAAQLTQTGSTAGVDAITGSTMTSEAIFTAMDACLAQAQMSKHILVCLPISSEQRTRIEAVQGFAYRFTTPDTATVEDALWADAVLGNLPVPLIRQNDHLEWFQSNAAGPNNYLEPGVLPEGCIVTNATGAYGLAISECMLAMWLSLLKELPTYRDNQREHRWAPTGHSVGSIAGSRVLCVGMGDIGSNFARRAHALGAEVVGVRRTVHPDTPCPDYCTRVVAQSALDAELPQADLVALSLPGTPETLHLFGAERLALCKPGAILLNVGRGTAVDGEALAAAVHSGRLSGAGLDVTDPEPLPPEHPLWAEPNVIITPHVTGGFSLPKTLDNIVDIFVHNLKRYAAGQPLDNQMDRRTQYASGARLQSTLMGADYQEVLGRLHNEAMIGKFVRMFLQDDSFQILEEALRRGDVKEAFRGAHTLKGVCQNLGFSNLYAPTYTLTETLRAGQLEGTREQFAKVAEQYQCTMDAIRALDMLVKLPGGYLKARKNCAHCKTVFQKQSSLFLFPPLLRDMAIGVPRPLALEKPQSVDLAQAARYFGAHGEPDAATLALLQKCAVPLLAVAMPQAVWLLADTPALTEAGLLPGEDVHKHLTGCGQAILLAVTLGPGVDAQIRRAGVGDIAAGVASDALGSALAEQAADAAEAQLRQWAATEGKYLTGRFSPGYGDWDIAVQPLVAAALDTVRKAGLCVTDTNLMTPRKSVTALLGVSDHPVKGQLAGCGHCVLRTRCEYRKRGKTCASEMQVNELFRQSNTILLDGGMGTMLQAAGLKLGARPEELNITDPALIEGIHGQYAAAGSRIVNANTFGASAHKLAGSAYTLEQVITAGIENCKRACAPYGALTALDVGPLGELLEPSGTLAFEDAVAEYARIVKAGEAAGADLIFFETYTDLYELKAALLAAKENTHLPILASMSFEAGGRTFTGCTVESFAATARGLGADAVGINCSLGPKEIFPMAKRLAEAVPGNFPVFVKPNAGLPRADGSGYDITPQLFALQMKPYRELHLFAAGGCCGTTPEFIKLLNGTFAGCTPGRPAHRMPSVLCTPVDTVTVDGITVVGERINPTGKKRFQQALREGDMNYVLEQAVSQAEAGAQILDVNVGAPGVDEPVLMEQVVKALQSVTSLPLQLDSSNVEALARGLRVYNGKPIVNSTNGEPEKLAAILPLCKKYGAAIVGLAIDEKGIQPKAADRVAIARRITEAALAAGIPREDIYIDCLTLTASAQQEDVLATVQALEACKKELGVRTVLGVSNISFGLPCRTYLNTTFLTMAMYAGLDLAIMNPSSEEMMAAVYAYNVLTNRDKQSTKYIERFADRVPASTALAQAAKAVPAASATEAELTGPYAALMKAVEKGLKGDAAAHTRALLAEKQPLEVVDEALIPALDIVGAKYEKGTLFLPQLLQAASAAQSAFEEIKTAIAQKGEGSASKGRIVLATVKGDVHDIGKNIVRVILENYGFEVLDLGRDVPVETVVDTVREKDVHLVGLSALMTTTLKSMEETIAALHAAKLDCKIMVGGAVLTPEYAEKIGADWYAKDAKRSADIAKEFFGVMNSLQILQFAFIMSEQHPQTAYRKYAVLTGTVFENCDKRPAYKKDCMGLLCTAAAAAPAGKYACMGFCGENLWEVMGDVRSVLPECTLIMPDNRGNSLWMEFAAISFVFSLAIQLQVCLVALERVDVDNIVLHAPEQYHVACGKVSPVADLKQRKQKAGSVVERRRKATLPAVMDKLNDTLQKKNLGAFYTHKLYAEKSLELVRAAIACVPTGNDYIILDRCAGTGNLEAGLTDEELSHCVVSTVEYYEYKVLQELLGAKVRHIIPPIEMTDTFNAGLVSGADALSKEYIENPVIKQYIANPQCTIILFENPPYAETTSAEHQRQGQSKKSSTWKQSYVVTEMKKEVKGTASNDLGNVFIWSGFKYYLRQPTDSYIVYSPVKYWKAQHLIDRKFVKGFAYNRRHFHTNIDACIMCAYWQNIADSRKEIEIAAYDIDDNTGTLVSCGLLPVKQVFTTYSKIYYDKRPIPDEQRTGILAGLNGLEKVGGKQRNKPATAPDIMGYMVAHSSGFDNPDLDSSLLIAARYDGNGFFLRKDNYLEKLPMFCASRYITYNRAWTERARIMKSADGADRYNADVASGKLAQFLLKCLLFTCTEMQNHMRTFTGSDGRFYRDELCLDGTNGKTIALRDIKGLIPGDREKAILNQWETVLQWAKKAENYSPSLTYGVYQIYAELDTSHVDETTGNTIWDNVELHTALAGLKTLVKDYYNSEIVPVLFEYEFIKMKEIEFNLLTEPWIRVRLRDNTVREVSLTEALVSAQDYVDLAGEMPTQNAAVLRRLLAVLFTVFSFIQAQGDNLYETLMLNLTLLRDGRECWGESKPCWELEAPKSAERTEICCPDNPAQLLTLQSRRLLLHRTGENVEGFCLLGGDFFPLDFLQPVFSFQRMRWTLNKTRLLAGKTDPENTSLWLPLWMHLWDTAGIMERLVRQWLPESAKRAMGFEREEALLAHARFLGGIHDIGKATVAFQANILRTLPEARQRLEMLTPLDCPEQNRRESPHARAGEAILLWNDCPGGLASIVGAHHGRPQSCAAVDDQLEGWESNYYPKGQKKVWQGFWTELLMTVLQDCGFDDTTELYDLDPQEEVLLTGLLIMADWIASNTEYFPLIPVEELGSMEDYPARVDRAWEKLALPFPWEAQPGIADPQEFAVRFGFAPNAVQRAVLEAADTAAEPGILILEAQMGVGKTEAALAAAEIMASRFGLGGVFFGLPTQATANGIFPRLLGWADTQSEETLPQAIKLAHGMAELNENYLRLQGRGVQLEEDAQEEHQVQVHQWFRGNKQALLANFVIGTVDQLLLAALAQKHVMLRHLGLAGKVVIIDECHAYDTYMNCYLDRALEWLGWYKVPVILLSATLPARRRTELVEAYQQKKAAPDAPWETSCGYPLLTWTDGAEVKQTAVPSDAPGQTVQLTTLTEPELPALLRRKLAEGGCAGVIVNTVKKAQKIAQLLRESLPDKEVQLFHAQFLMPDRAARENQLMARIGKESTPKERNDLIVVGTQVMEQSLDIDLDVLVTELCPMDLLLQRIGRLHRHHRSRPAPLQQACCAVLDTGEDAFDAGSEAVYGQWLLWRTRKFLPRSIRLPEEISPLVQRVYGWELGAPGGAQGEEMRFIYEQTQEKKKARAEAYLVPQPETHRLAQLNTLDDWMQNEGARSDPAARAAVRDGDPSVEVLVMQCRADGSIHFLPWQEGGSAVAADSPPLPETALKIARQKLRLPAVFGKAWKVDRVIRELEADNRSRLAAWQLSPLLHGELILLLDENLTARLAGMELCYDRENGLYYQKEETDEGNMVDYADIGKRIRACRLAKGMTQEQLANEVGVVVTHISHIETGNSVPSLKTLIDIINALDCSADELLCIEIKKAKPVFDSWMTEQLADCSADEAKIIKETVVSLKKSLRKVYGKSSKYRYDMRREISEAKPMEAKTHIGLDDVVKRSFERLQKGVTEKAEEKLDAATEKSFAELEKELEYKNNDDGMPYRMEQDLLSDAEYKRNGYEYTTDHLGRLFTAEGDLHLKEHDGRLQIKDSIHDIGKGYEKSTDDRGHAIADRFDGANDLENLIPQDSGLNRNEFKNFENKLAQEVEAGKKVNLKLEMHYPGDSFRPDAITAVTTIDRKQEVKVFLNDMADELEVLEKQQLSAQRSLNDLTDQLTLADHLVYKKYLTELQNYGMVELSQKMLEVQDPAQCIRMFQLKKLTLKKGEDMFQKLSTVYYSSMAQGCSLAVMIDVPEENAGANIYLGVREDPLKQSMKSRKLEISSKALQKVLLSNFPGSDIKGISPEAGKKLLEEAFGEEQEAVASVSCVAALRDKSKTEDKAFVQGIERFMDAMEGEKYTALFLAEPVSNETQAAIRSGYENLYSTLSPFRKSTWSYTENQSTAVMESLCSGTSHTISDTVSTTTTDGTNQSSSVTDGTQKTKGVSGGINGGVGSSFGTSVTKISPVVGGIAGILGLGGLAASALIPGAGAVIGPLLGTAGRAIGGMTPARTAFNSIARNIGGSLGVNASRGTSHSTTEQTGTSHSTSDGTSHGTSDTTSQQESHGTTDTRGTGRTQQVELCNKSVEELLERIENQLKRVKESEDYGCYNCAAYFLSSTQSTALLAANTYRALMVGEGSSVESGAVNVWKNNEAEVAQLREYLKRFMQPVFARPLWENAPDSLLYTPATLVSGRELPMHLGLPTRSVHGLPIIEHAEFGRNVPDEAMPDEDKMNLGKIYHMGKEEAAELLLNRQAMASHTFITGSTGTGKSNAVYHLLDEITKNGQTTFLVVEPAKGEYKNVFGNCTDVQVFGTNPRETPLLRMNPFAFPENIHILEHIDRLVEIFNACWPMYAAMPAVLKDAIERSYQKVGWDLRNSESEKGVFPTFFDLLDILPGVIEESHYSKDTQSDYVGALCTRVKSLTNGIYGSVLCAEDALTDEALFDRNVIVDLSRVGSMETKSLLMGILVMKLQEYRMCSSGMNSRLRHVTVLEEAHNLLRKTSAEQSQEGANLQGKSVEMLANAIAEMRTYGEGFIIADQAPGLLDMSVIRNTNTKIILRLPDEEDRKLVGKSAALKEAQIDELSKLPLGVAAVYQNEWPEAVLCKIEAYPMPENAVYHKPSKMPHEINAEFVFGQLAVGKELEPLSSSEMEQLKLWLKRHETVLKPEDSRYLEWVFAGGELDVAKTRKAVFDFFDGISTVIDYCAAAEKSFTPRKEFLEQLQGQYGLKAAAADWVLNSVISMGMSLNPDAEAVEDLRTNFERQGGRVLMSKIQVEVRFTDKLESIRVGGQEMEIPNAIMTKSVEEWFEPAAGRVNWDGLGAEIKAMGFSGEKNTVYSFLFIGPEDKKQEFMACVERFCLGEEAQQETKKETEQDYLHNAQNYQQAGNAEMAFQQYMVAARDYGHPEAQFKVARCYQNGTGVEKSEENALVWYKKAAEQGNAEAQCVLGGCFYYQTLGVEKDDKEARKWYEAAATQGNVTAQYMTGRLYAELSYNEAAVKWYTKAAEQECPEAQCELGKCYETGDGVSKNEEKAVELYRKAAEQGYAEAQYKMGECYYYDEDEATKWYRKAVENGNEPAMLKLAENLFCDGIMNDTDEKIQEAAMWYQKVAEQGNMKGQYEWGDCYYHGWGVDENKTEAVKWYRKAAEQGFAQAQRTLGDCYYNGDGAEEDDKEAAKWYRKAAEQNDAKAQYKLGQCYEDAVGVDLDMEKAAEWYKKSAEHGNREAQCKIGYCYYFGWGVDENKTEAVKWYKRAAEQDHAEAQYDLGECYYHGWGVQKNEGEAVKWFEEAAENYNADAQYELGCCYYNGEGVEKNSAKAVEWYRKSAENGNASAQYNLGICYEYGQSVTQSKVTAAEWYRKAADQGIASAQYKIGLFYENGYGVAQNKEEAAKWYRKAAEQGNADAQNSLGYCYKNGEGVEKNSAKAVEWYRKSAENGNELAQYNLGNCYKCGDGVTKDLGRAAEWYRKSAEQGYAMAQCNLGYCYKNGIGVEKDVIKATEWYQKSAENGDASAQYNLGICYEYGTGVTLSKATAAEWYRKAADQGDADAQYKLGVFYENGYGVTQDKEQAMQWYKKAAEQGNESAKSAIDRMQSSGMGTAVAAGVAAASVGLLWKILRGMRNSRLDRILYIQQVLVQGGVLNKQQTADRFGVSEKTIQRDLDTLRSYFADSEPRREILYNSAKGGYLLDDTLSRFLTSSEILAVCKILLESRSMVKEEMFPILDKLVRVCTPLDRLNQVKDLISNERFHYVEPQHGRKFIESLWEIGTAVENHNVMEITYCRTHDGETRVRTIEPVGILFSEYYFYLAAFIEGIDKDKHFRNPQDNSPTIYRIDRIQNYKTLDRHFAQRYTDRFQEGEMRKRIQFMYGGELQTIRFEYTGPSLESVLDRLPTAKVLQVTEKGWIVEAEVFGTGIQMWIRSQGDYIKIINTMKKIWMFLLGAAFAAELFLLVCMASRSASPRQVMYTFKDDVWDVIYRLNRRWNLMKLITKEVSNPEKKFWIWDEKITNKQDGRIYPHNTTNVGSGKSVAVYQLSESGKEEQIAQLEIPDYKKLEEYYWQEKEICLDYTYIDEFEWLGDKAPYEVEGNPYREYEKITARAAIFYSEEPKLIHLMQLKIQSEDLDFSYAGFYNLNLDICDIILVNGNVEFSDAHIIETEISLGGIECGGSRYFTPEVSFRYIKARKSKILTMLMTQSLSLDFLCAKTEETEACLDPLPKTFENLCFVKSNISQVKLSNASIKELDIREARFDCLELLRCEILGKSNLSGSIKRFLFNDCINTNILRIALEDTEEVSFEDAINSGRIYFKDFPKLVEKITEKKNEQLLMLKENFRQLGEYDNEDICHLHYQKAKTKEEKRYYIRGLRRLLDWISGYGTKPCRTFLTIILLILIFGTAYYVIPCLQYQGVSGWLECIYASAITFFAVGYGDLFPATLATKMVSLVEAFSGVTMTSYFLVLLSRKVIRMKGIHKVVVGTKYLKYEFELRRNLTIIRGDSATGKTTLVDMIRTHMNDGESGPVTLNCDKSCYVVEGNLWKGQLDNIQDSIVFIDEGNEFVKTKDFARAIQQTDNYYVIVTREGLPALPYSVEEVYGIRTSGKYGTLKRSYHSFYRIYPDSTTEKIKPEKILTEDSNSGYQFFDAVCTEHQMQCDTANGKSNVFSYLKVHKDEKILVIADGAAFGPEMDRVLQLVQTRKNLALYLPESFEWLILSSGILKDAETTQILQTPSGYIDSKEYFSWERYFTALLIEKAAGTYLNYTKKTLNKAYLSDSTKNAILGQMMKGKPEMLNIFYGDMKEAVYNTASYFKYDYEEDWIVDPMVKEMIQDVDKSTVIDSGVIDSPVLGKIPPIGLSGGVKTLILVKFEPEKVFNVSTCGDNCAKWLLKIAEQEDRTVNLRHLMDFGKKPFTIKVLNTNQIVHSMEELILAAGEFVMILNRLLDKFENSKHLSEPNTSRRRVMLRIDKRELPEYQYEDAVVRDAYNIAARELEQQALVRLEWARKQSVLSCIVLDLERVAQCYECADRVHPRKKAEEVANIIMQKLADNPVPWIAAWRDAVCAQVRNSMKVPTYCRGNDGLLQELLLTFQRYAELSGSVTMRAFSSQCFHDTKYFERNVRELFLTIARKYNTQLAAACTEAELGARDQLAFLGIYARPELYELSGDCAICLKKGELRLSAAEPYGLALPSTLVSEIVDIELKNICCITFIENKTNYDEYLLAEKQPEELVVYHGGFLSPRKKKLFEKLAAAAGETMQIRFWADIDLGGFCMFENLQTVFPQLEPMRMEGRFVEQYHKNGLKRPEQYLKKLKEERNAGRHTLFVDAIDKILQYGVTIEQETFLEMKKLKKILLINWLYFSKELIEVGDINFLTGKNGAGKSTVIDALQIVLLGETNAHNFNQAANEKSQRTLEGYLRADMDDNSPYSRRGKDFSTYIVCEFQDEMEGSSFVTGVTFDCRSDGSYRDTFFIYTGTLPENCFIEQGEAMETSALRRFLKQNYARAEFYDTQKEYRRNMLAKWNVHNEQVLRMMKKAVSFRPIVDIQKFITENICDIPDKPNIELMQQNIRDYKRHELLAQRQQEKLDALQQISRLYQEMNQAIDRCQIQKFLVRWAEKEAAQTEIDRRELERTECKENLANVNEQREELERQIEQKETRRSELELAYRQSNVFQEEERLLNTEKALRDEQKKLEQGLQNLEVEIKREARHLQRFCGEIQELEPEELLIPVQEAANTAQKAYAVFTGDEKGLFARPVELFETGQQAVAELSDAVRSAAHKTEDRIAELKKQADQKSAVLANLRRNIKDYPHGLLLFKDRLEKDLADKTGHAVPVYILADVLEMADERWRGAVEGYLNNQKYYLLVEPGRYQDALNIYDRLKQEAEYRAFGLVDIGKLREKETLRPLPGSLAEKVETENKLARSYVDYLLGRVICCDTAEQLRCYKTAITAEGMLYQGYVARALRKGWMEDAFIGRRAVQLRIDHLEKELACLQEELRHWQPLQKQLTGLQEPLFTQRFVRIDVAQKQEDYQRVQTIIKEIAEVKNQLSQLNLFWLDEQRRIIEQLKEEILAFNKEKDAKNVQKGKLEDRIHQLEYEILPEKYQRYEAIEDVLNEEFTKEYRETIGVPRYRQELVRLKKADVIRKNFGDSLAQSTKAMDGAQKKLLAARREYAERFKPCAFQIEVMDNTEYEEERRTLQESELPRYKEKIRAARESAMEQFQNDFLAKLKSSIDQVQDQVHNLNKALRQAQFGTDKYQFRVGPNPDYLDYYNMITADELMEGESGLFALPFQQKYGPLIEKLFSQITMADDTQLNVRKQSELQENIVRYTDFRTYLKFDLETTDQNGSKQLLSQTLNMKSGGETQTPFYIAVLASFAQLYRVNDATRFGNTVRLVVFDEAFNKMDSDRITESVLLLRKMGLQAIICTPPDKVSDIMPIADRTLLVDKSGYRMHIIPFGKEMQNEGSTGDPESSAGMNFDFVTNATAKELEQFKSVCNQLLSRTYIVRTIYQPGKGRVDNPDYLFLSRHYEAVQEYLSLLDWDLRRDELNGYFYVLNTDEANRCNLNKKETAILLALRLIYEENMERLGLEQDAVCTVRDVLEKVVTDYPVFPAKPNMEEVKRAFTVLENHSVIQRLEGKFNQGSCRIAILPTILSAVSSEKLNLVVSVLKKEETDEEAEEDPADQLALFQMKFFEVVPSELFSPLASPNRILYADALDVLYAAYQENLKIREDVLYSMLRGRLEQELADATFEDEDIDEEELRDISGRARFLIRKLCSKGWFEKERGDDFEEYITIPNYSSRLLELFHQLRDDSPARGYSYVFGTFSVLKTADDSNNAYDKMTALYSAYDNTTALISLLQMVYHNVKHYFQTQIDMQDVNQVLAAHFNDFGQKVVEAYIRPLKIKDSVPKYRVPIQSVLRRWEEDDTLLMAMANEALRDKRGKTLEDCRADLLRKIFWIEERYDNLEKDYLEEIDTQVRRYTRAATQKIENLTNRDQSVRGNLNVLLTALSRNRRAAELVDQIQPAFQLYEQSFLSEKSLWYRKRPEKRTKTASVLIQDDQAPNTEEQVRAAQLLQSKYGRAAVNAYVQGWLGDADIRCSEELSLEEDKDYIMSLLAILGSKDASAGYVVQELDGIFCKNGYSIPQMQIRRKEKKPMNKAYKQYFDLIFGSTLLTLGIYLFVTPNGINFGGVIGLAQIIEIFLRRFIAIRSDANLVGMINLLINVPLFLIGYRVMSRRFCIKTMLSVAVQTLLLSVLPPLKAPLVEDVLLNCIFGAILCGVGVGYALRGSGCCGGMDIACMCLVKKYPDFKSGRLSIYVNAVLFSVCLFLFDLETTMYSIIFVAILYTVADRFHDQNINVAALIFTDVSTVQTEILQKMGRGVTFWNGYGAYTNHPKKILFCAVNKYEIGELQEIIHEQDPNAFVTFFVGPLIHGGFEKRLMKLKSDFLWGGALAANQCEGAWQEDGRLPASADFLPDAAHGRWNAMLHPGNILETRYDYYPSREAIDFYHRYKEDIRLLAESGIKALRLSISWTRIYPTGEENAPNEDGLRFYEELFTECRRYGIEPVVTLCHFDVPEALIRKYGAWADRRLIALYEKYAATMFDRYRNLVKYWMTFNEINMITHIPYLGGGLLVDKDDPEFNQIVYNAAHNQLVASACAVRIGKKINPNFRIGCMMAAGSFYPYSCNPNDVMEARISNNKNYIFPDVQLNGCYSGFARNYLAKLGITLDEQPGDDELLAQNTCDFLGFSYYSSRLISTDPEHLKNVADGNAITTLRNPYLQITKWGRQIDPVGLRVTMNDLYDRYHKPLFIVENGLGVEDTLEVDGSVHDPYRVEYLDAHITQMKKAVLEDGIPCMGYLVWGIIDLVSAGGGEMDKRYGLVYVNKHNDGTGDLARYKKDSFGWYAQKIREECYEMKQDAFFQTIIHHIGGEGNVARKRFDGEHLYVTVKDSGMADLEELNRLDGVSGTELNRNILSVTIQEDFLEDVTMAKDFKQLAQNIMTLAGAKENVTSVFHCMTRLRMTVKDVKKVDQKAINDLDGVLGVTYQGGQLQVIIGKDLLKVYEEVLKLGYSDGGAVDEKLDGDLKGEKISVGQAVIGYISAAVQPMVPALIGGGMIKVFLLLISKVYAPFADSSTYTLLSIVGNAVFYFMPILVAYGAAKKLGATPTYSMVVAGALVAPEWTAIVSAGDPVTMFGINVALKGYGSSLLPALLLAIVAYYVEKFLNKVIPGVFKPIFVGTLTMAATYAVSILALAPLGQLAGTYVTAAILWLYNIAGPITVALFTALFPYMVMTGMHMTLGAPMIQLLSETGFDPLFRPGMLLSNMAEGGASLGIAIKAKDKAIKSEALSVAVGCIFASVTEPAIYGFNLPLKKPMWAVSLGGAIGGVVAALLGAHNYEYGSSSLFALPIFEDTIVAMVIAIIVTIVASCVLTILFGFDEEILKKHMRIVRKINNSAAVAQDSRGKELIVIGKGIGFPAVPYELTDMSRIDRTFYDIDPRYFEMISTLPQEILLASADITEDAQVVLNTTLNSNLPLTLADHLNFAVERFRSGLNLTIPIAYDIRHLYPNEFDLGVKALDILKEYTGVSLPDSEAVSIAMHLINAEIENSEIHSLVKALEIQEGVESIVEREMNLKLDKDSYSYYRFTMHIRYLIQRLMSGTQSETGSGSMVKMLANDYPKTYICAKKIAAFLQKQENWCCNDEELLYLMLHINRVCQKNTMRKRIGKRLVSAVLAVSMIVSMMPVQAFAKGMPRAESTVEILKQENDAGMTDDIIEIKVGSGVSFGEEPSTDNMNTEFWSYGTNLLGIKTLTLKKGQFKLTGGALQDEIKLSIESGATFVDGKVNGEVSNAGTIEGGTFSHALPHTSMNVGPNGSKTQWVGGIVRNSGAITGGTFKGQLWNGGVVSGGVIYGEVYNKGEITGTPEFAVTRDDYGNRGGNPSKYGIIKNREGGIISGGSFGKNCQVTNQGTISGGKFEIGRFYYQIENSGGTITGGQFTDSRVLNGVLNNISGTISGGVFDNGYIVSNSGGVISGGTFRKGAVNNTGAGTKVGIVRGGIFSGTVTCDNSSEIEDGVFIGDVTGPTIYGGVFKNKPDAYYLSAAVRYANGTTTFSLLKNGNADVSGVLENVTVLYVASDTLAKEITIVPSTDVIDVSGNIKYNGKAGGPMQLRMEMRGESDDLVLNSITKKIPKYEDFRWDQAQRKVVSDVPGMGVVTTYYKKTFIMPTQPGSYKITYKVAESEDYIAFEGPDDTGWTLNLYTVTVDGGTADNTVAAASDTITLTRGVAPEGYSFDYWTLNDEKIEGDTFTMPDGNAVLKAHYDINSYILTVNGVPETKTYGDSVSVTAEDKVGHTFSSWTVEGMTVEDASSKTLEFTMPASDVTLTANYTLNLYELTVDGETVQKEYDAEVTVTAKDEVGHTFTGWTVEGVTVEHETSQTLHFRMPANEVKLTTNYSTNQYTLVENGRADKRYYHDWVTLQAQSRTGQIFDHWEISGVEISEEEAKKMRLHFRMPANDVTAEAIYTINLYAVEVEGGRAEVDGKTVTAVPYCKTVTLVPEPEPGKEFVRWKVVGDNTNLSIMRNSFTMPYWNVKIKAVYKDIYYTITITGGNASSENYKKATDAKYNERIYLKAVPENVGDELDYWEVNGQKIDGSEFNMPAENVTIRAVWKRAIYKLTLEGATATVNGNPASTAQYGDNVWLTAEPPYGKELARWELSGLDGTKTIKFGRMLNFKMPANDVTAKAIYEDGVYSIFITGGTVENTEHKAGELVLVQVDETQFPEGQTFKEWETAPELDMQPTDGGCTFTMPGESVTIKAAYQNRFYDLTVDGKTESREYGSLVNVTAPEKEGYTFAGWTVKGAQVDNPYNQTLLFRMPAGDVTLTPNYTANKYSLTVDDTMEFKDYGEPVTVTAAEKEGYTFTDWAVDGVTVADKTSKTLAFTMPAGDVTLTANYAINHYTLTVNGKAEPKEYGEYVYAYAEDRTGWIFTGWETKDLELTEDEKTTNGIMFYMPAHDVTLTALYEAEKYTLSVTNGTPENTTAVAGTEVTLTANAPDKGMQFDHWILSDDLEIVSGSLTDTTITVKMPWGDASAFASYTFAPRYMLRIVMDDDYESQLLTADEEVVLTAKEPAKGRQFDQWKLSEGLELVSGALTDATIKVRMPAKEASAEAVYKEIPKPKYTLTVTNGTPTSRQEEAGTEVVLRANTPAEGKLFDQWKLSENLELVSGSLTDETITVRMPEGNATAKATYKDAPKPEYTLTVTSGTPASTTAEAGTEVTLTANTPAEGKQFDQWELSENLELVSGNLTDETITVRMPEGNATAKATYKDAPKPEPEPYTIEVQDGTAFVNGAEAAAALAGTEITIHAKAAPEGMKFSGWQVETPQTLELKDGTAAKTTFIMPDACVKISALYTTSEVPDPTPDASGGGAAIAAAAVGAAAGAAIGIGVWAVNRYILSNLPVGMAVPTTRQQLAVVLWTMAGKPDVTPTVHYQDVAGLDAQKAVHWAVEQQLMQPESAEYFGTQGSVNKWQVFQLMKQVVKQRTIATPNALMVDLSSVFIPTKEILSNSWNLSNVVQQGNIIFDDAYLDIIAVAEVNVASGKDNSRKKKYLDELKKTARVNHPGFCIRKLGWLLLKRENKRMKNEKCAKDEPHAEGEKKALVKVSSNDTNIAMTFTHKSQKHNAEVAGKAAMQFWGQTTTHFFTFFPSIFSQKWNFKKFSISQKGGIFPHEYTHTVENPRSHQMTLDYFYGQSGELFSYFRIPKALFQDSRFRQLSTDARTLYGILLDRMSLSAKNGWLDEQGRVYIIYTVREVQESLCCAEHKAVKLFRELEDIDLIRRKRRGLGRPSLIYVKDFSSGLPKAQVQNCPNSNSGAVKTASKMEVDLLLRLCPDDEDTIYQIVDLLVDTCSTKRKMLRIAGDDKPAEVVRSRLKKLNADHIRFVLDSLAENTAPVRNMKQYLLAMLYNAPTTMNLYYQNKTNHDFARGSPKAGMGKSTTCENLGIGLAMEGKKVLLVGTDPQGSLTIVASLLWLVVCTACRFIFARHADIAISMGWQQPDELPTTLSTLMQKAMNDQPIQPGEGVLHHAEGIDLIPANIELAGLEVALVNSMNREKMLKQVLDSAKREYDFILLDCMPSLGMLTINALAAADAALIPVQAQYLSAKGLEQLLQTVQKVRRQINPKLKIEGILLTMTDSRTNYGKQISNLIRQAYGKHLKVFEQTIPRSVRAAETSAVGKSIFQHDPKGKVAESYKSLAKEVLADADRQRKLSSERARMPIDNGNLALKGLDDLFSTEEKRQEEQREQVQQIPIDALPPFTNHPFKVLDDEAMTRTVESIAQYGVLAPLIARPRPDGDGYEIISGHRRQYAAKLAGLDTLPVIVRQMSDDAAVILMVDSNLQREHILPSERALAYKMKLDAMRRTSGRPSKENVSQIGTQKRSDQIMAEELGESRNQIQRFIRLTNLIPELLDMVGEKKISFNPAVELSYLDECQQRDFLEAMQDTQNAPSLSQAQQLKKMAQQGEFSYEKAFDVMGQEKKSEKDTVTIKNETLRKYFPRSYTPKQMEEKIIQLLDAWQKKQQRRNERTLALFENQYSVQPMGVSYNSYVILDEKIAVMDSVDARAAEEWLSNVARVLEGRSPDYLVVTHMEMQKNFVVYPLVAAVELDGFVDCCPRCHTSVGYRWLEEIQPAFLQMADIDQRMNSGKEGQPLPSEKQGWKIEIRQGMRLNDNNSFIGINPPYQLSVIHSSKLIYPREIYQRGVERKRVELIARDFNEYIVNEPKVSFCNGRYYVMDGQHTIEGCILLNGGEDRPILCKVYTGLTMEQEALLFAEQNGHAAPLSAGIKLRAKVVGGDAPSKAFVAATNRVGLSLNYDSMQLSDYRIKMQQNWKFQRGDIFFTHFGASTGSEQCGDRPAVILQNDVGNYHSPTLIVATMTSKAEKKVNQPTHCLLENAGLNMPSVVQAEQIFTIDKSRALKYLGHLTPEEMRRVDDAVRISLALNPMGSIQQIEPIRRSTALYAPPEVVDGKPPVYPYTPIKSSFENAGNIEEMMLYTELQSAVHAMIQRLEYSFTFNPSLLTIPKRKQQVAEILEEAEKYIWRIKEEMRCAMDELNPTVREQEIYEEMELTPEMVKSIRTLCGTCLRHFVDAKAFKIALVPSADRSMDTCTVCQMRRGYDYVVMHRMNYNSGNARRNFYAKWDKLREEYRAAGMKEDAIQKMYEYDLAVFNDDRAHHRYDVEIPSADDSENRNDYADFVRATTVTDTYHETKTRFAWVGEVQNERLQVGLEKLSDDDLKLLTLYVYEGYSTVELSKAYGIAHQNISKRIIKITNFLKNFDFQGADMHGVNPYPVSVIGILPLPESGGKDTKMTDVMNCVDKLREKKISGYKQRMAVNPCGVYRMASGVHKNTDTKVETVSANSVCRQLPQKTAEQGLAAAVAFAEEVQWSLAIRRTISGVGFGEALKLLMNDRDMSVEQMESESGLSVSTVKRLRAGQDASVEQIVAISVALHLPPPVSGDLLRMCKITLDFNDQENTVYQMILTEYYKEGIEQVNVCLAACGCAPLKTACMPSHAEKNQTEIKNYYHIIDPEGRLSENEKAEEERKVLANMPACFPAALRYVMTRFGFTQEALAFESKVSESTIGRYRNGKVKSFSEKNVVALCVAMHLPPWLSFALIAKAGFSLAATKEQLAHSMILNCMYMRSIDEVNEYLRERGTDSLSRETAMSNTRARKPGGGRKPSKPEYSAAKNLAQQMKAAADLYTDKMSLQVIADALSLNPIKVRKLLITAGVYESDTAKLVQQTFNAFRETQSYSAAVTSTMSALQLSRPSVTSYLPYEKGVYFPEEADASNISTGAERQRHYRAVAALKKNPCEENLWKCVAAFRGYKFKTMSGLPFTYTLKKGRGTGFTKELWINRREGSKSLAWSSVLLAYHNIGKIGEVVDRPKALGDIRGVSYIYGLFYRFGLIDVPDKAKEKMAKQMPRTKGSKNRITASTDFDAQIAKLQKDKAMLEEGLSKTVAMKKITIKKTKNIKNLEFVFPQSKGVYLIVGPNGVGKTTLLVCIDRICNKNAFARGFSASRSFGEVDQYAEAEITYDIDNPPTSLKFRKKSSRWAVSPKGHSNLLDNFGYTQTVFIRADSNRIDVPKEEIRRGNFVAADPDVKRNLNRIFETDKFDRLKRLRIANGRGRHATFFYVIEERRGQYYSEKRFSTGEIALLRLVEKLNTVENDAIVLLDEAEMALHPRVQKKLYDYLVEVAQQKNLTIFISTHSVTMIKSADKNHIISIEEAENGKYDAVCPCYPAKAIGNVDFIDNVIYDAVFFVEDDMARTLLKRMIQTCCEEDNRFKTITNCIVPVGGYKQTAELAINTKSQLLNRSVVCAVWDADVFTETIPNDEEIARFYNENRRFIFNLGCTPEVWMIEKLEGMDANIVNRIRTKFHTEPSIIVNSNEYSSCNSPKPRKRAKQKMDVVLEKLSAACGEPKEVVLNEFADILVSNAYTVGQIKAIVAPMLAGMKSDSNFMEAFNPDVNLVKEFQYWLILLREGQNTLGDCIFVLKRECESFGEMLPEESAELSSAMNWFEKKCKEQFGAEKFNYIAAMMRDNFVHFHAFPRYSKELVKYGTTWKDERWPRVIQFGPTSVDRTVLDRILIDLRDMMPNSRNLLKDYESFRIIVPLVYQLSEEYFYTSSSINSYINWGLLGIARCVGKNDGKGVDEIYNLPLESLLKIEGGKMKGLCVSKGSVRGKAIIVDSVFATKTIAPGTILIMKTLDRKLLVSLSKNVVGVIAESGNIGSHGAGILRSLKIPCVLRIKDAVSIINDGQEIVIEGEKGEVHWCENEISQGKTATHSQHGTIYKSIATEKFEVTDISVNREWYCPRPERAYQKLRFDIIAPVFGKSGNFLFGLPEATVVQNGFGAIVVKGAPLNVDICKFVLKNPEWLVQKSHERERAIQEIRSTLRAIEIKENSDSIEYYLDIIKIGIKLYRRLFLYSLMSQAISDELLDAYVDFESRSLVMIHQEIYWDMYKNLIELSEICQNEELCGGKAHYLFLLKKNGFNVPDAIVLNAIPYGNYIQGKDDSEQLNRAILKAIDSKFGTKQVIFRSSANIENTDDTSSAGVFESFVYEKENAPYQYLKRIWDSSLDEKAKGYYELTGINKDSVKMAVIIQQYISGQVAAVIQSFDIVNELPIMLIEYASGSTSAIVDGTIDAEFISVSRDNRIVEKPETVPFGMDIVIELNNSIKILEDLLKSHVEVEIQIENNVIYYLQVRKLLMVMWLKRIVSYITVFIAIGYLVYTTIKAPVDLYQYMILLLLILISTTFILDNMDEDQKWRNIENDLKNIVSEISPTQIRFFDNSSDWVDAMELLVKNGKHTVDTASLDSSTRTKSPNSRSRIWNHITDCCKNENIKFRHIVRVRKNNYSNLLDRLLAGSEKENSFYAYYELPQTFSFPTFGIIDDRFISTRSPYSEGETPRYYIIENKEIAYYYIRYFKELWEQAINITDIEQIRMLYQKFESSFDEEEKKQLQEKIDQIRTKGIMSDVMKFTFKQFHRQDSDDIWEDIPEKRPLTLIIFDLLLSPTYRLPRTVNTVRIYKDWNCFSVCPRCKKVIEYEYQSYCGSCGQFLDMNTNLKQGCGILLIASVAFLSILALLPDADVDHDAGYTASELSIRETVDENVTSTSYVNSDGGITDAIDMGYATVCRMRDDNGRVVEERYLDASGRTVARYGDYYGLSYEYDKTGTVITYLDAEGNPIERSDGYSTIIRTQSGGRAYDDFYYDLSGQQIQCSGGYYGIHREYSSDGQNTSLTFLDKDGHAVCAPSGYAIKTYQRDGNGTVVGEQHFDTEGNSARSSLGQYGELYQRNEQGYISQITYLDADGNPAPTNAGYTILKRTYYRDGTADMDMYFDANVNPKALSKGQYGIKRSGKVNLLLDRNGNAMLCVDNLLNGLPCMVVVFGCVVCLLMIVLPKSLSVVLTIVYVAFILYETLMFREAGEAKTNFVLFSYAGKFLKEQSVRVGVINNIWLFIPLGTGLYRSFQKKWVLLIPFVMSVAIETTQYITGLGIAECDDVFGNTMGSWIGVLAAYTMMTWCKGKISYHLQRRSTRMGKYFGTDGFRGEAGITLTADHAYKVGRFLGWYYNALRERNGDTNPARIVIGKDTRRSSYMFEYSLVAGLTASGADAYLLHVTTTPSVAYIARVDDFDCGIMISASHNPYYDNGIKLIDCYGEKMPEEILLLVEDYIDGKLYVFDKDWLELPFAHREHIGCTVDYVSGRNRYMGYLISLGIYSFKGVKVGLDCANGSSWNIAKSVFDALGADTYVINAQPNGTNINNNAGSTHIEGLQKFVVENGLDVGFAFDGDADRCLCVDEKGNVVTGDHILYIYGCYMKERGKLLTNTVVTTVMSNFGLYKAFDEQGIGYAKTAVGDKYVYEYMAKNGCRIGGEQSGHIIFSKYASTGDGILTSLKMMEVMLAKKMPMSKLAEPLKIYPQVLENVRVTDKKAAQNDPAVQEAVKAVAEALGDTGRILVRESGTEPVVRVMVEAPDHDTCQKYVSQVVETIKSRGYGVMNKNRERGKIDWMITLLPLTIIIALCILFFFAPEQSNAVLSQIRFFFGDTFGTYYLVIGLGIFILSLYIACSKYGDIVLGEPNEKPQYSFFAWGSMMFTCGLAADILFYSFSEWVLYATDPHLAEMGSIQDWAGVYPLFHWSFIPWGFYLVLAVAFGFMLHVRKRTRQKYSEACRPILGKHTDGWAGRIIDLLAVFALLAGTATTFSVATPLMATIIGELFHVAVSRTVINIIILLITCAVYTYSLLHGFKGISKLANVCIYLFFGLLAFVLLFGGETRYIIETGFSSLGRMMQNFIDLSTFTDPLRTSNFPQNWTIYYWAYWMVWCVAAPFFIGSISRGRTVRQTILGGYVFGVGSTLTSFIVLGNYSMGLQMTDKADFIAKYLENGDMYGMIVDMIKTMPGAPVVMVAVLITMIAFYATSFDSIALTASCYSYHTLKDDEQPNKGIQLMWCILLILLPIALLFAESSMNNLQSVSIVAAFPIGAVIVMIAASFLKDAKKYQAELETYQNEMAAGLGNRMHPVTLTTPKPLVKVNGKRMIDTVIEGLHKNGISEIYIVVGYLKEQFAPLVTEYPGVRLIENPYFDTCNNIASLYVARDHIENAIILDGDQIIYNPDILAPEFERSGYNSVWTDEETDEWLQTVEDGIVTSCSRTGGKGGWQLYSISRWTAEDGKKLKRHLEIEFEQKQNRQIYWDDVALFCYPEEYQLGIRPMNKDDIIEVDNFSELAALDSSYKKYEGEAMNKQESDILNALLLEPFINQRVLAEVSGHSLGVVNRSLKELIKAGYLNEAICPTAKAVAEYKNKTPKRAIILAAGFGMRMVPINTEMPKGLLEVNGEPLIERIIKQLHEVGIQEIYVVVGFMKEKYEYLMDEYGVELVVNPDYAAKNNLHSLRLVKEHLENAYIVPCDIWCDRNPFHRHELYSWYMVSDLVENESNVRVNRKMELVTVPENVGGNAMIGISYLTKEDSDTVSARIEELCKKPQYDGLFWEEALYNKDRMIVTARVVHSTDVVEINTYEQLREIDSDSNQLKTDAIRLICKALCAKPEEVTDITVLKKGMTNRSFLFTCKDKKYIMRIPGEGTDQLINRRQEAAVYHAIADKNICDDIAYINPENGYKITEFLEGARVCDPTDYEDVKKCMSRLRDFHAMKLKVAHEFDIFGQMEFYETLWDGMPSVYKDYEKTKANVWSLKPYIDAHTGEKILTHIDAVPDNFLFVQKNGKEEIRLIDWEYAGMQDPHVDIAMFCIYSLYNKRQVDRLIAAYFTDGCDDATRIKIYCYIAACGLLWSNWCEYKRNLGVEFGEYSLRQYRYAKDYYRIVQDELKKSGESGAQKNAMNGGINDIATWKELSVEEHKQRALHILLEVASFCDENGIKYYLAYGTLIGAVRHKGFIPWDDDVDIQMPRPDYEKFAALFNSRNRSDNIVAIMPNSPNAKHTFMKVCDLDTVKIENGVKCKQGEELGIDIDVFPIDGLYEDDQRYSAAYNAKKKLYHKYQVIGLQLYTADLHFDLRSVLKLIKRASTIAYGKVCNTFFRSWKKEWLLEQMHLKETEVNYESARVVGSNCSKDDIFDDRYPKECYASQVPVEFEGYLLSAPVGYDMILTKQYGDYMTPPPTSKQIAHHGNKVYAKITEEHMEHDFTWKNDGRTKVMIGCGTRPEIIRLAAVIKRCREYFDCCVVYYNQNWDRNLSTVFWEDFELKNTFGEFGPDILVPVVGENLGVTCGNILGRSYELLSELQPEGYLVLGDTNSCLSAISAKRLHIPLFHMEAGNRCKDECLPEETNRRIVDVISDVNMCYSEFARKYLADTGLPKERTYQTGSPMAEVLHMNLEKIQKSDVLERLGLEKDKYILLSAHREENIDSEKNFLSLFTAINALAEKYDMPILYSCHPRSKHRLEKSGFQLDPRVRVNEPLGFNDYNKLQMNALAIVSDSGTLPEESSFYLSIGHPIAAVCIRTSTERPEALEAGDFILAGITTRELLNATDMAIEMKQKGVLGKPCPDYVDETVSMKVVRIIQGYVNVVNKMVWRKTGAKGMVGTALCNNLKNIRDGKNKTRPALNIEEIYEYDLNSTPAELNEYCRKADFVFNLAGVNRPENPEDFMKGNFGFASDLLNCLKKHNNKATIMLSSSIQATLAGRFGNSEYGRSKKAGEELFFQYAQETEAKVAVYRFVNLMGHSRPKYNSAVSTFCWAVANDEPFTVNDRSTELELLYIDDLVEGMFDLLEGKEQHCEFDGVETVLKADGRYCCVPVTHKVTLGEIVDLLQEFKAQPTTLMMPKMPDGSFAKKLYSLYLTYLPTDKFKYALKMNVDNRGSFTELVHTADCGQVSINISKPGITKGQHWHNSKWELFIVVAGHGLIQERNINTGETVEFEVSGDKIEAVHMIPGWTHNIINLSETENLVTVMTCNEIFNPKHPDTFFEPVFQNLSVKRLFGRVAMELVLSMSGITIALFLVTKQIAVLLTGGTLLLCALVGIFVLTQAFGKRLSQFTADLCQTLDHMIAGNEAPQRPEDSETQLARIGHRLARLYQIMQENRRRVDEERQELQTLVSDISHQVKTPVSNLKMATDTLLEKPMTEAERTDFIRGIRSQTDKLDFLFQALVKTSRLETGVIQLDKKPGRLFDTVAQAMSGIVYAAEKKEIAVSVDCPEDLTVFHDSKWTSEALFNLLDNAVKYTPAGGKIAVSVVLWEMYVEVKVTDTGKGISESNQAAIFRRFYREEEVHEQQGVGIGLYLAREIVTRQGGYIKVVSEPGKGSEFSIMLPTKLLSFIELFPKNWQQHNYLSLGGVSGKALRQFLSERPDVERVFLCLDADKAGEDACKRLAALLPDTMSATRIQPCMKDWNDVLVHRAEILNRNYFKSIVLKEPPKKDSVKIIRMSDVEAMQPQSIMEEQESRRELYDGLKRLTQREQTYLLYRYGFTDGEEHPLIGTAIYFHLTKGRSNEKAFMLMRQFGFHVDGHECIEVKEGDTFSFGKHTVTFVGAPMVHWPEAMVTLDVTDGVLFSADASGATLVDTAGYLSAIVDAAKNAQTTQAVEFNGSSEDLKLNVVYGAAHGTKCFTSGAVATAGDTIVLSYIDEFQFAGSDAGVVGVPNSDSDFGAGYAEGKVLMSKRVNADYYSKMMAEKAGSTVSLDANYDAIQNHVNGMSIADAEALSKDEKAVDAVSGATLVDTAGYVGVLVDAAKMESNKLLKDLFLTMRNDYAGWDAKQKRHDPSPFVTMLGQAYYDRRMSSLLVLQAVSQYCAGMRDRNLKFALHDADYTPFSRGFAVRRCTEGMFVDLVTQETRLHPGDAVLAINRTAPERIVQNLPNPLLAADVPEREQWNGYLKLARDITVRHADGTEETLELARYPVEGDAASSVQELGAGALLLNPGTLNDAVLLEAFVQAHQAQLDGCTQLVIDLRTTRGEDEEALLPLLPYIVATDTTAGEIFGDRRIRTNYTKMNCTRLIRMLKPYLVDEDPALRQMAQQWTSYYRNQSGKGWVDEVEALPVPAEMPILHRGPEKVVLLTDTWCEQEAEHFVQLAKQQGRAVLLGRPTMGTLDYTNPVTVLYDAFSFTYPISRTMASLEGNGVDERGVQPDVVVPWTAAECIRDLLAEKAQTLMNKISRKGFLKIAAAAAMSGVTAGALSACNSSSSSVAASGASVYTAGTYTATAKGMNDITVTMTFSDTAITEVKVDTANETLDLAVNSAADFQTMLMEAQSAEIDGVSGATVTSNAVKEAAADCIQQAMGLTGGAEDESTSYGDDPRGAARAAAKADGRVFGYSGPGDWLGEAPAFSSVDSEVDCDVCVVGLGHAGVAAVLGAAEKGAKVVGIESQTEDNFAWYGEDIGAWNSKFAQDAGIPAWDLGQICDEFVTRSGGRADPGIVSLYVQHSGETLDHMLDVCKEMGVDERVYTYDNSEDGWTIIHLNADYDKIAAGKNIYDCLDMTNYPRKPGTRTWPATIQFMGPYSAEPVDGVAANSVLKYVQQAQLDKAVQDYGAQLYYGTAAQVLVQNDNGDVVGVIAKNADGKIVKYNTKMGVVMCGGDYAGNAEMCWALMNEYMERNEREGGLKKDFFSFMGGRDGSSLKMMCWAGGMIEPAPRGTMILGGGINSTPWGANSMLWLNSDGKRFCNEGNVTGASTATARQKNATGWLVTDKNFMKSICACGIEHSGPNAGRPQYYQDLIDDMEALPCSSEEQTIRSCFVAERMMSKVFKCDTLEELAKAMGVPDDKMDTFMASIDEYNAMCDAGKDDKFGKDASALIPIREAPFYGCAQTLGNRSASPSMVTMNGMMTDLNLNVLNIDYEPIKGLYAAGNSLGGRYGTGYSTPCAGNSIGMAVTHGRLAGQFCVDNVMTQCKILVVDDNADIRELLEILLTSEGYDVTLASSGEQALQLLHPELDLVILDIMMPGMSGIRVCEAIRKQSNVPVLFLTAKGQEEDISLGLRVGADDYLPKPFSHTQLTARVKSLLRRYRVYQGKGDPEDEAWLVRGPLKISRTYNEVEKNGQPIDLPELEYQMLLLMASHAGHIFSAQNLYESVWNEPYLYSSNGTVMVHIRKLRVKLEDDPQNPKLIQTVWGKGYRFGMADFREKLLHGLRGELVRAILLAIAVSVLLYNILQPISKTALQTYYLNSDFLPRKTDAVGTMLQQNVAESGISSKQVQQMADWYSNDGRPGGCILRVEKDGIVIYDSALNNVEYYRTYSQASKTLDEEAYLRTYPLEFSDGSATLYVYGYFDFFVDEAVRTFEFWLCLLLGICIVLWAVWKKLNYMELLNQSIRVLEGGQLDYKVPVQGTDELAQMARSLNEMSASLKQQMEQVQQAQTQRYDLITSLSHDLRTPLTAQLGYLELLAEHRYQTPAQHDEYLNKCVHSCRSVIELSNGLFRIASGESPQRNPKLEQLPAPDIFLQVFSEKLTLLEETGMQYLAPSCTPCLLWLDIDALCRIADNLISNLQKYADPAQPVCFEVTAEDDRFCVCLSNAVCTTPQGDSHGVGLKNVAALMERMHGQSSYTIESRTFCITLHFSRMLFQKQLEWYFKQYFYSSFYFSLFGTFYPHGSCRMARNCTGVSDSSAKMKYDARVCHFNMDTGCVELQLRDGRKISIDCTGVEDALDVTMAQQTELDYLIYNDPLGYADLILNGDPKEYLKNVTGSHGLEDMDYYDPRRRALRAVRQLLYPRECPFCGRVLGDVRDCPDCAVQLETLRRKPGIRLDPAQHYISNLAGAAAPYRYSGCVRRGILNAKYQGKPWRAVEMGNRLVQLAFGGELTVQYGELLPQPVPWAAIGYDLIVPVPASGKRRGYNVPELMALPLAKAMEVPLAPQALERTRAKRHQAGLPLEQRIANVAGAFRAAQPQQLEGKRILLVDDVITTGTTAAACAQALLHAGADSVFALAFATVEFGAPPDDTTPIHEDDEEDVYRDFMKKRILAFLLAVSIAVSVLVLPVSAASINNTALQTAITLGAVPTGQELSANITRGAFAKMLVSFSTYRESVGAQGTVGTLYRDVPGSSQWAPYIRIAVQQGWMNGYTDGSFRPDNTVTLEEACAAVLKLLSYKTTDMTGSFPQAQLNKAQQIGLRDQLTCTQGQAMTYEQSTLLLYNALRANTASGSAYGSSLGFTVSNGQVDTSSVLLKSRKGPFVAEEGTQLPFTPVSVYRNDKASASAELNKYDVYYYSESLQTVWIYTRRAAGRITAVSPSASAPTALTVAGSNYTLGSSAVASKISSLNGGGVGEVVTLLLGMDNEVADVITGEEADSVFYGVVQTATRSLVEDNGADVLQKISVMCTDGITRTVNIDKSLNYPTGWLVEISVTPEGEQVTAIESKSVSGTINDTATALGDYALADDVQILDTTSEGLAGTVRPSRIAGTKLNALAVRYYTLNEQGQIDRLILNDVTGDLWKYGVLDDVKNLAFNASSILGTLTGSGSSGSGDSSSGDSSSGSGSGSTGDGSSGSGSTGGTTNTTTVVDDLRSVLVPTTSEILWGVIDGSLLSTVWNRITSSSGSLLSIGLKQLANITGQPMSTILNFVGGGATYICYVNGSQASFSTSIKYPVLAGGLAVRQNVNGTVKAMIQLMPMKIDQVGAASVISNGTRYETADDMQVYLWYKGQYYATKLSEVNSEGYYLTGWYDNFGCAAGKRVRVIVAVKKDMIFETFRQAIQNVWSNKLRTFLTMLGIIIGVMAVIVIVGLGNGMTKSMRDSFSALGTNTLSIQVWGYGSRSVSVEEMYDICQRHSDLIKAVSPQVNFSGKASGTLKIGTTSYRWSNMSGVDENFTEMKNYQIVQGRGLQYMDMQDNKQVCVIGDYLNRVAFGGNGVGQTLKIGANKFRVVGVLSAKVSDPTMQQGSDDDCVYLPYTTVMRLSSQSMVDCYTAMMADESLANEAKSTMEEELMSILKTENGYYVYSASEWLEEMNKMINMVIVILTGIASISLLVGGIGIMNIMLVSVTERTREIGIRKALGAKERTILAQFVVEAATTSALGGVLGIALGYAVSMAANKVLPMFMTDTTVTVSPSFNSIVVAFGISVGIGVLFGYLPARRAARLNPIEALRYDMSALIEFDEVCKYYQMGDTTVKAADHITMKIEKGEFVAIVGQSGSGKSTCMNIIGCLDVPTYGTYRLNGRDVGKMNRNELAAVRNEMLGFIFQQYNLLPRLNLMENVEVPLVYAGISRAERHIRAREVLEQVGLGDKLKNRPNQLSGGQQQRVSIARALVRNPPVILADEPTGALDSHTGREVLGLLQQLHKQGHTVVLITHDNSIAVQADRIIRLEDGQVVYDGDSHAPEAMVQPTLLPETPEKEEQAMIWNKSKQPADPQQDAAAAPKKGGAAAFAQKNWKWLVPVAIVVLAGGWWLLKPKGAKPANVDTSYTEAVPETRDVSNTLSGTGTLKPANTYSVKSLVPGKVLTGGFEEGDIVEEGTVLYTVDSSDATTKVEQAAITLQQAQRSYDKTADHQYVRAEVAGVVSSLKVNKGDEVKSGQEVAVVRDSSKMNLVLEFPAADAANFSAGQTAQVTLDGTFEVLPGTITAVTGTDALSTGNLLTRTVTLSVSNAGGLTTAQAATATINGVSSIAAANFQYQAERTLTALASGTVTAINVREGGSVNKDDIILTLSGEELTESIQSASETLRGAELSMQNMQDAMDNYTITSPISGTIIEKNAKVGDALSTGSDLCTIYDLSYLEMTINVDELQVSSLKVGQSVQVTADAVKDKTYEGLVTRVSMKGDTSGGTTTYPVTVRIDETDGLRPGMNANAEIVVAQAKNALTVPNAAIVRGGYVLVRQDSPSAVNADDSMSAPEGYVYVKVKTGVSDDNYTQVTSGLSESDTIAYDPSSVSSDSYYDDGGYDDMDGEVIGGAGNNADLAEGGEETLPEETENGEAPAADAEEPAEGIDPAEAGAVVVDMSIKQKNSDTAAPKGSAWKKNVIFALVVLVLAAGIFLAVRAQHPAKGSGLQAVVDFGDGVTETLPLAQDHDYLYEVGDYIVHLQVKDGAIAFLDSQCPDHVCEQFGWLDKDGAWAACVPAGVYVVVEPITDAGMKKNQIRKSVAALAMAAVVSVSLLGYGCGSKSASSTAGVSGEFTGTAKGMGGDVTVTLTLTDGKITGCTAEGKDETPGIGTMALEQLPGAIAESGSIAVDGVATATITSDAIKEAAAAALVAAGLNADDYKTEVKAEENKAEDSTIDADIAIVGAGGAGMTAAITAAAEGKSVVILESQPMVGGNSVRATGGMNAGKTVYQDENEFGESAGVEKTLKTAAEKYADNATITALAKTVSEQWAAYQADPKGYFDSVELMELDTMIGGKGINDPALVETLCSNSADAIDWLDEHGITLHSVSSFGGASVKRIHRPVDAEGKTLSVGSYMIPLLQENCDKAGVQTLLNTTATELLTDANGAVVGVKATGSTGETITVNAKAVVLTTGGFGANLDMVTEYKPELKGFMTTNAAGAQGQGIEMATAVGADTVDMDQIQIHPTVEANTAALITEGLRGDGAVLINAEGKRFIDEVGTRDVVSAAEIAQTGSYSWLVVDQAMVDASSVIQGYIKKGYTVTGQTYEELAKAMGVDEAAFAETMKTWNGYVAAKNDPDFGRTSFAKALDNAPYYAIKVTAGVHHTMGGLKINTNTEVLKADGSVIPGLFAAGEVTGGVHGANRLGGNAVADFTVFGRIAGAAASKYAAMATFESMDRRMPKIEACLKANGLESLDACNEMLLAKGIDCDKIVRGVQPICFDNAVWAYTLGTAIAVKRGLTDAAECAAAIGEGLEAFTIPGSVAEQRQVGLGHGNLGARLLSEDTTCFAFLAGHESFAAAEGAIGIARTANKVRKTPLRVILNGLGKDAAYIISRINGFTYVQTEYDIPTQTLTVVKEIPFSEGERAAVKCYGANDVMEGVAIMKKEDVQCSITGNSTNPVRFQHLVAGTYKKWAIENGKKYFSVASGGGTGRTLHPDNVAAGPASYGLTDSLGRVHGDAQFAGSSSVPAHVEMMGLIGMGNNPMVGATVACAVAAAQANAMTYSQQVQNMCPITKGPKHGPAPIPEEGAWVKAYEIKDISGYTHGVGWCAPQQGTCKLSLNIKNGVIEEALVETIGCSGMTHSAAMAGEILPGKTILEALNTDLVCDAINVAMRELFLQIVYGRSQTAFSEDGLPIGAGLDDLGKGLRSMTGTIFSTKEKGVRYLELTEGYINKLAVDANDEVIGYQFVKLGKMMEDIRHGKTPNEAYEKNVGTYGRFSKEQGAVKYIDPREEMKQQFAAKHPWTILAAGAAIQVLTGLPAAWGVFQQPVMEEYGLSEQGAGYAFALLIAAFGVGCVLGGFLQDKKGPRCAALWGTALLCGGFFAAAFLPGRAGWGFFLAFSIPAGLGTAFLYPSIQSCAQKWYAGRKGLATGVIGGAVGLSGAFLTLFVRAALQGFGPVQGIRGAFWALGALTLPVCLAGSAVLSDPPQKKQQPSGKNGIDLSPGQMLRTKQYWLCAGAVCFSTPAVLLFSPIILKLGMERGLDETAALWSIVLGSVGSAAGRMLMPMLSDHIGRRATDLGLFAASLGLSTAFWAARGWWVVVCYAGLTFCYSALAAVLPALSTDLFGLPHAGVNYGFLALGQSVGSLAFPFAANLLALENGRHLLAMAGAAAGFAAIWALHPVQKDPRMPEKGRERFLTQYFTIIKDNAGLSIQMGTLSQIAQIFEVKVMKTQALKGMRDLLPAEQTLRDYIQGKILETYRSAGFERISTPMLEDMENLDKSEGGDNLNLIFKVLKRGDKLTAALNTGDPKQLSDMGLRYDLTLPLSRYYAANKDKLPNPFKVIQTDRVFRAERPQKGRLREFVQCDIDILGDASPNAEVELIDVTTRALLNIGFTGFTVNINDRRILRGMLESMGFAADTLDSVCITFDKMDKIGAEGVKAELTEKQLPESAIQALADFIAAGDVTLDAVAARCADPAIADDLKYVLATANTLAAGRYQVAYCPSLVRGQGYYTGMVFEVTCPQFSGAVAGGGRYDNMVGKFLGVQVPAVGFSIGFERVCGILLEQGYQIPGAKQKIALLYGKDTDFPAVLSKAAALREQYNVTVLPQGKKLGKQLGQLEAAGFAGAAFMDKDEVKIFAQQMEQSEKTLDMIVNLCKNRGYVFPGSEIYGGLANSWDYGPLGVEFKNNVKKAWLKKFVQESPYNVGLDAAIIMNPQTWVTTGHVSSFSDPLLDCRACKARHRADKLIGEEHPEVNVDAMSFDEMDAFIAEHEDIVCPVCGKHDFTPIRKFNLMFKTAIGVTEDSSSTCYLRPETAQGIFVNFANIQRTTRRKLPFGVCQVGKAFRNEITPGNFTFRTREFEQMECEFFCKPGTDLDWFAYWKDYCENWLLSLGIKKEHLRLRDHEPAELAFYSRATTDIEYAFPFTDWGELWGIADRTNYDLTRHQEASGKSLEYFDSETNEHYIPYVIEPSLGCDRVALAFLCEAYDEEHLTDSKGKEDIRTVLHLHPALAPYKCAVLPLSKKLGEKAMEIRNELSKYFMVDYDDTGSIGKRYRREDEIGTPFCITVDFDTVGDEAKGIAADNCVTVRDRDTMEQVRMPISELKSYIESKIEFMHDGMEKGSLVISRKQHILICALAGLLILGGVLGLSAHSDLQNAEKQFEDTISYVKEQCTSYDNLNLATEAKSLMRVMENAQHLCSEIARDQQENPGRVLDDAAMEEYLQDYTLSGILVLSAEGKILCGASQDGRVADPQVREQMEKELAGSIVLKVADHPQQVYAGRTEKEDSSYVDTAACARKDGDGVLVVYYRTTAEYVRNYSLSYQNCVQGYNPAVDGIIVVTRGDRIVASNDTSLLDTTVDENPTLSALKARSTDGGMIHVHSTTGQQYAYGIVGQGRSFYIYVYRPEQEVYASTMRNVSMAAFAYMVVLFLLQLLRGKTARRYREQQLRREQEYQKTLKAAALKAESANLAKTEFLQRMSHDIRTPINGIRGMVEIGDRCPEDMARQADCRKKIWEASTLLLELVNEVLDMGKLESGEVVLENVPFDLPELIHEITDVLEKQAEERGIVLHREYGRLPHPRLVGSPLHVKRLLMNVLSNAIKYNREKGRVMLDCFELSCTGDKVQICFVCADTGIGMSEEFQQRMFEPFTQENAGARSVYGGTGLGMSITKSLVDKMGGTIGVESKQGVGTTYTITLPFAIDNTATEEPERQQTDLTVLRGRQVLLAEDNALNMEIIEFLLNDVGIKVTKAADGQQAVEAFAASPVGGFDAILMDVMMPVRDGHEATRAIRAMDRPDAKSIPIFAMTANAFAEDRLKALQAGMNEHLSKPIDPDTLYRLLVKYLTERSMKKYRRGLRLAACLLALATCAVLLCSCLHPGKADSYTAAMPVIVVGSDNYPPFNYMGTDGAPTGIDVELATEAFGRLGYRVKFVTIDWEKKKELVENDTIDCIWGSFSMDGREEEYQWAGPYLYSRQVVAVRSDSDIRTLQDLAGKVVAVQSTTKPEELFLNAEQNGLPRLRRLYSLQNRDLLYTTLLKGYADALAAHESAIRQFMKDYSVEYRILDEPLMTARLGVAFAKERGDDLPQQLTEVFREMLADGTVRQIVSRYLDDPGHYLDGLEDSAHAMQNIDLICVGKLNAKYFAEGVAEYQKRLAAFAAFRILELPEEKIEEKNASDAVVKKALDKEGKAILSSVRKGAAIVAMCIEGKQISSDELAQFLAQRAGSGAGDVAFVIGSSHGLSDEVKKAAALKFSMGRITMPHQLARLVLTEQIYRACTINAGMKYHKMAKKSTKKTLKPVRPQLGDGVEILNAGSVLEDPITRTLETNYMPYAMSVIVSRALPEIDGFKPAHRKLLYTMYEMGLLKGARTKSANIVGSTMHLNPHGDAAIYDTMVRMGRGNESLLVPFVDSKGNFGKAYSRDMSCAAARYTEAKLESVCEELFRDIDKETVDFVPNYDSTTTEPTLLPVTFPTILANNTLGIAVGMACNICSFNLAELCATTVALMKDEHHDIGTTMPAPDFVGGGQIVYDEAQMREIYENGRGSVKVRARYNAVPGENMIEVTQIPPTTTVEAIMDKIAELVKTGKVKEISDMRDETDLNGLKLTLDLKRGVDADKLMAKLFKATPLEDSFSCNFNILVSGQPRVMGVREILKEWTAFRIECVRRRTYYDLHGKEKRLHLLQGLAAILLDIDKAIRIIRTTEEETEVVPNLMIGFGIDEVQADYVAEIKLRHLNREYILKRTGEIEQLEKDIADLNDVLAKPARIRRIIINELNDVAKKYGKPRCSEILYDLPEEDAAAEEEAVPDYPVTVFFTREGYFKKIPPQSLRTAGAHKLKEGDEIIQQLETRNNVEALFFTDKQQVYKVRLAELEDGKVAQMGIFIPGRLGMDEGENVLSMVITGDYSGFMLFFFASGKCAKIPLSSYATKQNRRKLLKAYSDKEPLAMMLYQPEETELAIRTSASRMLLVGTAQIAAKTTRDSQGVAVVTLKKNQTIASVVPADTLELANPHRYRVRSLPATGALIRAEDEGEQMSLLMAKKQEYGNESITSLKGADRVRKRPAVIFGSDGVEGCAHSIFEIVSNSIDEARDGHGDTINVTRCKDGSVIVEDFGRGMPVDWNNGEGRFNWELLFCEMYAGGKYGEGEDNYEFSLGLNGLGLCATQYASAWMTADIYRDGYHYHLDFKKGENVGGLQKEPYKGRRTGSIIHWKPDDEVFTDIDVPGSYYKDVLRRQAVVNAGLTLNFTDEKEKDPATGKPWHESWCYQNGIADYVAEVAGEDTLTPVFSCESEAVGRDREDQPDYKVRMSAAFCFSNKVQLLEYYHNSSWLEHGGSPEHAVRTAFVYQINKYLKEKNLYKKGESTISFQDVQDCLVYVSSSFSTRTSYENQTKKAITNKFVSQAMTDFLKHYLEVYFLEKPEEAQKICQQVLVNKQSREHAEKTRQSIKKTLSTQIDLANRVQKFVDCRTRDSARRELYIVEGDSAMGAVKSSRDSEYQAIMPIRGKILNCLKADYARIFKSDVIVDLIKVMGCGVELGGKHNKELATFNLDNLRFNKIVICTDADVDGYQIRTLVLTMLYRLTPTLINKGYVYIAESPLYEITTKDRTYFAYTESEKAAFLQKIGDKKYTIQRSKGLGENDPEMMWLTTMNPESRRLIKVMPTDVVQTAQVFDILLGDNLAGRKEHIAQHGAEYLDDLDVSMSNILSLFSRTAPGTKTAKKSRSYFARRDAEKQKLFNFFKKVCIYPFTKSKFQVMFGIQKSLRAFLNPLFTGGVVEENGICNSDRTLIIAALLMEIRNATMDDLQAIAAVEAACFPAAEAATAEEFAGRLAHYAEHFWLLFEQGEPVAFVDGFCTDMPDLTDEMYADAALHDENGAWQMIFGVNTLPRCRRRGYAGLLLQRAIADAHTQGRKGLVLTCKEKLLHYYAKFGFVNEGVSASTHGGVVWYQMRLRFMPTENRTTLTPDTPVRYLKGVGPKTAERFEKLGIVTLADLLCHYPRRYIDFSKPYSIAEAPADTECVVKAEVFAKPGGRILPGGRRMERITAGDDIASLEITWFNNPYATQKLQLGQEYYFQGIVTGGMLRRQMVNPQVRTAEQIQAAPFEAVYPQTEGLTSSAISRCIRQLLPHAELLPDPLPPEMLQKYRLLPKAEAVRAIHCPATEEQAAAARRRLIYEELLVLQLGIGRMRSRGAAATGAPMRRADPSPFWQSLPFAPTGAQRRAVEEILNDMAGETAMNRLLQGDVGSGKTLVAAAAIWACIRAGYQAALLAPTEILAAQHAEGLNRLLAPFGMRVALLTGGMKAAARRTTLAAIRKDEADLVVGTHALMSEGVEFARLGLAVIDEQHRFGVRQRGALAEKAANPHLLVMSATPIPRTLGLLIYGDLDISILDELPPGRTPVKTRCITGKRRRDLYRFLDSEIDKGRQVYLVCPAIEDVPDGGLNAVKTYYEDIAKALLPDRRVGLMHGKLKPKEKAAVMEDFKAGRLDALVSTTVIEVGVDVPNASVMVIENAERYGLSALHQLRGRVGRGAAESWCFLVSDNTSEAVQKRLKFLCSTTDGFAVAQYDLETRGPGDFFGSRQHGLPTLQIADLMNDTRTLHAAQSEAAALLAADPLLESPAHDLLAAQVQQMFDKAGPMNMEEQKRHSGFEAMRILSMVMIVLMHGIGHGGLGSAAPQGSAAFWIYWLLFILARVSTNCFVMLSGYYLSERKGAVRAGRLFRIGAQVWFYSMLTFCVAVKAGAVPLSAISLLRALLPLTSNGYWFASAYFLMYLSVPVLNAVVQSLDRRQYKTLLLVALLLQSVWGTLFYWATDETFVNNGYSFIWFYTLYFMAAYFRKYRVTVPSGLCLLAYLAASAAGLFNRMLALRVENALHLNGFVNTVNGYQALATVIASAAMFLLFQNIHIRSDYWRCWVFRLAPLSFGVYLLHDSDFTRALLWQLVDLPRFGGALLPSLAYLTGAVLLVAAAGYAVDAVYQRLYRLLHLPALETKLDALTARILQNIVGSKEMQVTIKLATREGAAHVSGILAGFTLLAKRGELTLRVQDVRQGNPLAREALLETEIDGRTVVFDLMDGYFYNDPAAVLALFHRADVVFKRSFSEEKNRQFPGDIPAKLRPLGLNYYVTCPGSPLEAERSAKSRLKQWALSTRCYPQDFEARLTRVRKKPRILFLTRLWDPEEPAVQQYPDLQAEWRQVNADRIELLHRLQAAFPEQFTGGVSDNACARRQCPELILPDKLTGKRAYLHRMQHTEICVASTGLHGSTGWKLAEYVAAGRAIVTEPLRYTLPGGFEEGKNYKTYTSPAECEAQLRQLLADPAAILAMAQHNAAYYQAWLRPEQQVRQALRQLETGEMMVYLTGDTHGDIQRFKQGKLRWLGKKDTVVVLGDFGFVWDGSAAERKRLDWLRKRPYTILFLDGSHENYDLLAQYPETELFGGRVQSLGGNVYHVCRGSVLELEGKTYLCFGGAESQDKDDREPGVNWWKQEMPSDEEYDTCRRNLEKVDYKVDYVLTHDAPSRFLDFTALALGESNRLHLFLDEILLKLTYEKWFFGCYHKDVQLSTKSRCVFCDVIPMGERRTGLFHRMKRIFALVLSFVFLLSCLVLPAGAMFDPSPVYQVQAASAYIVNTDTNIIVYDKDSTKQISAGGLTKYMTLAVLLTNYADQLDSTFQMPFAISDYVYNTNNADMRSNETFTYREAMYAMLTRNANEAAMGVAYTLSGGDLDGWVAQMNTLSQRIGTTASSWTDACGIDSGNTTCAVDMYLILRYLMSFDAFVEVSGAPSFTMPAKEKHRSSSVLVSQNAALSKASGGSYYRSAMQGGMCNVTAFKNDTGTQSYVSWGNKDGATYIFCVMDSPDSCDTFGYANRRPALFETVKLMDWVFDSFSIQAALDTDLTIAEIPVRYSSDTDTLQLYPNDSMMTLLPSTSDGTVTQKYFHLPDYVCAPIQQGDVVGTVELKLAGETIGVVDLIAGQDVARNPLLFGVDKVKEFLTSLYLKVVLVLSLIAGLIYGLWLLCANWNRRKPTKKIHRRYMGIAGNEWGFQVGTLPKGARDKISDVPGVTVGHCTLADGVVQTGVTALLPHQGDIFHEKVLAASYVINGFGKTTGLVQIDELGTLETPILFTNTLSVGTAQTALVKYMLERNPDICETTGSVNPVVCECNDCGLNDIRGLHVTEQHVFAALADCKADFAEGAVGAGRGMRCHGLKGGIGSASRVVELDGKPYTMGALVLSNHALFDDLIVAGTPIHTLLNNSIPPHEDKGSIITVLATDIPLSERQLRRLCRRVLVGLSRTGSYCGNGSGEIVIAFTTANRVPHYSEKALLPMTLLHDDAINPLFRAVAECVEESVLSSLLHAETVTGNHGQTFRSLTELLKNRTMSKDEYLITDAPLKALTVFAMPMILGSFFQQVYNMADSIIVGQFVGSSALAAVGACAALTNVFICVALGAGVGAGVLVSRYFGAKNYGKMKTIVSTSLLSFLVLSVVLGVFGFSFSRAMMSGLQTPADILEDAVLYLRVYFVGFPFLFMYNILSTMFTSIGESRIPLGLLIFSSILNIFMDLWMVAGLGLGVFGAALATLIAQGISAVFSFLIFLHRMRQYKSPFNKFDRQELYSMLRIAVPSVLQQSTVSIGMMIVQAVVNPFGTQALAGYAATMRVENVFSLIFVSIGNAVSPYISQNFGAKKIDRLKKGYHAALVLDLCFAVIAFAVIETLHTQISSLFLGKDGTALAYQVSGDYMRWLGYFFIFMGIKMATDGVLRGLGIMRPFLIANMVNLAIRLSVALLCAPRFGIAFVWLAVPAGWLANFLVSYAALRRSWPTENAAAPQMEPKTKQSLLVTVVGVTLFVALLRLSDVLAFAAKLIDLVLPILAGGILALFINVPMTGLEKRLNRLFGKAKKQPSAKAIHLLSFFITLLGVVLVLVLALTLLIPELVQSFHSLYVQIEANIPRWTAYLNAQDADMGWLMNWLEGINWEQLLHKVTASIDTVLVNAVGAVSATVNIAITASFALIISVYMSLSTESLGHQARTLVCAYLKPAHAAGVLKFCRLFRQSFANFLTGQCSEAVILGVLMALAFSVFKIPYGSLVGVLTAICAIIPYVGALISCVVSVFLVLLVDPVLAVRCLIVYLAVQFVENQFIYPRVVGKSVGLSPLYTLIAAMIGGKLFGIIGIIFFIPLTAVVIELVKEDTFRRLRAKEPLQMIKKISRRSFLQACSVAAATAALTACGGGKAESKTADAHEAVTFMAPYKEIEAFIEQVHSVYPEVNIEVVPYSGDNTTTCLQNMFAAGDLPDVCTLTYYDPQIDLVSDKLLDLSGYDFTDNYVESRLQDVFDNGAIYLLPSVYNCYGITYNKTLLREHGWELPNSFAELEVLAAKAKEAGVDLCLPQIQYPGYGFQYLCNIADADFLGTLDGRLWQKDYLSGKANVSNTPGMMQAMAYVKKWKDIGMLNGSGDALDDNVTLQRMAEGNTLFLIGNTNGIVEADGNADKFGLMPYLSEDGTQNVFVLNVNRFYGLNKKLKQNPQKLEDALKVMRVLSTVAGTSALQPATALKSSLLPFKGAKADGTYYADIADTLNAGNTAPFIYSGWENTFVTTGLKMLDFMKGNATMEDVIRQLDEDQDSVVNNTPDVITTVTEELSQQDCAMLVGRCFAQATGSDLALVSLSTWIPGNPTEQNHHGVAAKLYAKGITDYDLSVILPTGWNRTIQTVTLTGQQISDLLASGYDAYGNGKGYPYVLVSPVQPEAGKTYQVAICGVSDQLAAEATVTDSGVVGMDAAKTFFGAYTTISRADTAWSMNNKIYKKLFVGFGFVSIVLILTLFVMSQTYIQNLVYHERLSQMEEVTHQMFHSLEDVIDNHWDEVDVQCNYLYYTPLETDTDLYRYLKKLSELSNYHEKQIDLIAVDSAGHYYTTHGRTGLLRGITYLESAPERVSYVSNSLTVDDSRMVFLKQLPTPITLQSGEKEITLRYFGIAQSMTQLNDNFRCDAYENNNSVYVLDNNGFKLFNANDTELLKEHNVYTVLSQMSYLHGSSFAAAKERLTRTGSCYSNAVLDGTEYYYALKQMENAQWTLAFLVPAEYVAVNTQKLVNIVMAVIVGFATVFSIMAVIAGWFLLREKQQRELQAEKKTNLRLEQYNIQLTQANDEMRRAQDAAAEALQSAERASKAKTDFLSNMSHDIRTPMNAIIGITALMKNELHEPEKLAEHLGKLETSGQLLLGIINNILDMSRIESGKTTLNVEKMNLSQQISQLDSIIRQQAGQRSQTFTVSTNLQHENVLADPNRLNQVLMNILSNAVKYTPTGGHIRLEVEELPRNEHYARYRFVVQDDGIGMSADYQKTLFDPFTREERSGTNKVQGTGLGMAITKSVIDLMGGSISVESATGKGTRFEVVLEFPIDTKADTVQKAQALPEEEETTSPLSGMKFLCAEDNAINAEILQMLLETKGASCTICPNGQEIVDAFASVKPGDYDMILMDVQMPVMDGLEATRRIRSGENPLGRTIPILAMTANAFLEDMQKSKEAGMDEHLSKPVDISALEQVVKRFRVTPPRKMKKTYRSLFCLLAVLLLSVSVLPSASALFSKKLYYYGVVEGVSRTVEGKVESILVTAEEQETYQMIVTDSTVWQDHDEKTTSDPATLAVGEQICVVHDPAVMMSLPPQSVAYTVIRNFPAGTDLEQEARDAACPVKKFFADTRKAISDWFYQTMPIMIASEVREMLSFIDGNPTAYHTTAAVRDILLKAGFAELLESRKWALEPGKDYFVCRNGSSIIAFRMGDQLENYSFNVAAAHTDSPCFRIKENAEIHMGQNYTKLNTEGYGGMICATWMDRPLSVAGRVLVQENGAIVSRLVALDRDLLMIPSVAIHMNREVNDKASFNKQVDMLPVLGGACEEGALKKLIAEELKVSEEQILGSDLFLYVREKATVWGCNEEFISCGRLDDQQCVYGILKGLLTAKNARSIGVAAFFDNEEVGSGTKQGAASTFLYDVLHRIAQSLGGNDEDFHRAVASSFMVSADNAHAVHPNHPEHTDVNNCTYMNKGVVIKTHAGQKYTSDGMSVAAARELAARAGVPLQYFANRSDKVGGSTLGNLAMAQVSMNCVDIGLPQLAMHSCYETAGAEDTLSLIKLMQELYSSHFEETAFGTLSISKMSNKEKATKISWLTLAFMAFSTVWGFGNITNGFVYFNGPQVIFSWIFMFVLYFIPYALMVGELGSAFKNEGGGVSSWLHQTTNAKLAYYAGWTYWACHITYIASKGSGFLKALSWAIFRNAETYDSFPTRYIQLATFCILLLGCYIASLGLNPLKKLLTAAGTCTFVMSLLYIVMMFAAPAINPTAEYVHANLSFSSLIPNFNVTYFTSLSILVFAVGGCEKISPYVNKVENPSKGFPRGMIALAVMVVTCAILGTLAMSRMFDPAVINASAESFNAYVANSSYWAFQKLGQYYHVGDLFMIIYALCNVISQLAVLILSIDAPLRMLLDNEHTKQFIPQALHKVNAHGVHSNGIKMVAVLSGSIILAQSFVPGAAAVLRQLTKLNSVCMPMRYLWVFAAYIALRNAYDTIPAEYRFVKNQAVAKFFGGWCFAVTAVCCVLGMYDKDPFTFALNVITPVVLTVLGFILPALAKREQTAAKKMGEFAFQTLRESITSAIRSKILTGELQPGVKLAEQKLAEEFGSSRAPIREALRQLEQEGMVEYSRNVGCSVRRVKPEDAYEIYLLRANLEMTALRYFDCKFPEEDLRTLRGILEEMRNVRPGDLSQIVENDNRFHAVIVQRAGLPRLLKFWDDLNYGNLLIGANSGSNHETLAQRQNGIHTKLYEALASGDTEVACRAVYAHYMEPMERMRSANSAVQAADEAAKMFMPTVFHENLFDDLFDPFWNEGALERAMNREARDTFGKRGANMMKTDVKQTDNGYEVDVDLPGCKKEDVQMDLSDGYLTIQAVRSHSNDEKDNKGRYVRRETFSGSCARSFYVGEVKKEDIHAKFEDGVLHIQLPAPQQTKALPENPNLIEIEMFYSGFDALFSILFPLVFLFVLGMILFTVVGNLRTWSKNNASPRLTVPATVVAKRTNVSRHHTANAGDMTGAHGYTSTSATTYYVTFQVESGDRMELRLSGTEYGQLAEGDTGKLSFQGTRYLGFERNMAIFEKTIRNQNFDTLLRKLEHAIPDSSWSAELEAGSDFKEGSARCSVRVFERYSMVGGNRLSLTLTLFQNGDGPIRLSAIAAGGSQAVFFKMNTLGENAFLEDVKQLLEEILEGMDRKGLEQLIFDTYSVEPDYPWMDTPESAVFRHEANRKWFALVTTVPKSKLGLPGQQPVDIVNLKCDPILIGSLRAEPGFYPAYHMNKENWITAALDGSAPEDKLRLVLDMSYNATAPKLRKKKAMDIRLVCSDIDGTLLQYGKKELEGEIFEQIRALHQRGIWFCPASGRQYTSLRKLFAPVADCCVFICENGGTIFQEEQCIAKNPMPRALAEEIANDMWTRSEGQGEVMLSGQNTAYLMERGLGMLQRVQFVGNHYQIIHSPAEVPEDITKVSVYLHEGVENYVERFVPRWKQANCAVAGPFWIDTTFANKGIGVQCVCRILGIDLAQVMAFGDNYNDETMLDVVGVPYIMDNAAAPLRAKYQNHTPRPEDVLAQLLAQQPMTNKKLNYPAIAKEMAILTVAVAIIAAAVYFFLVPSHTSVSSISGLGIVLSNFVPLPLSAITMVLNIVLLIIGFFTCGREFGAKTVYTSVMLPVFLGLFERLFPDFGSMTDSQELDVLCYILVVSVGLSILFNRNASSGGLDIVAKIMNKYLHMELGKAMSLSGMCVALSAALVYDKKTVVLSILGTYFNGIVLDHFIFDNSIKRRVCIITEKEEALRQFIINDLHSGATMYEAIGAYNFEKHNEIITIVDKNEYQKLMNFINREDPKAFVTIYNVSSMHYQPKRMEQQKTETRSITAEQRKRVEEVCFRSLALIGRNCEYLEQHFDRTGADESTRQAVADIDTAAIQLDRTLTEAITLLEFLREDTKPQLYPIDLCELLQQVAAQSDMIRAQLGVDIRLDYGGCTACCVMADRRDAELLCLHLLSNALHASREGGSVCIALRRTESGWQLTVTDDGCGLPGEDVQAALENRRSFLGGAQLGLLLCRECCRRMDWSLQLEPAPEKGTQAVVRIPLYTGESRPDGTVELRTSSETEQEQRKYHLRAMLVREMRTMPERGDPEDEFMNSERTAQLQVALASYDLKELRVQKRYLQEQGTAIDCTCFCSGEKLLAQLRQGVRYDAVVLCSELTDLPAEQFVRQFYQLKERPMLLIQSHGRSSGTALQKLREGCYCVEGTELKRLLWQLYRMPGRQNRQLEQRCSQLYAAWGIPQGDVNAGYLSCAVGIACSTSQKLAIRKEILQAVSEQFDTSVAAVESGIRRMVDQLEEKPPLAWLAFKADTRLGSGKPTTGKLIYAVRDVVLRQKVPSTRLMERTFSPMIRQYSAIDGLQQAYTLVYAMEVEGTQGCRLTLCQIGSRQQIVSQHVAAAPEFCYRLLRYLCENGVQPELWRDAVTDLTAAGLVGEKGGAWREQMLKLKQINKEYKTGELVQHALNNVSLNLRDNEFVAILGPSGSGKTTLLNIIGGLDRYDSGDLVINGISTKKYTDRDWDSYRNHTIGFVFQSYNLIPHQTVLGNVELALTISGVSKAERRRRAAAALEQVGLGNQLHKHPGEMSGGQMQRVAIARALVNNPDILLADEPTGALDSETSIQVMELLKEVARDRLVVMVTHNPELAERYATRIVKLKDGVIRSDTMPYEPEDEAAAVAPVHRNMGHSSMSLLTSLSLSFNNLLTKKARTLLTAFAGSIGIIGIALILSLSNGVSRYISNMEKSTLAAYPLQISSTGVDLASMMDPDTYTSVSSGSSSAPEGMVTVRQLLSQLNIGAASNDLRSLKAYLDSDACTIRDNATVEYTYTPDPLIYRQNPDGTVQKLNPDTTFSDIASENTSVTSLMTSMASPYVFCEMAETPALYEDQYDVKAGRWPEKYNELVLTLNADGSVSDYALYAMGLRDQAELDKILQQYAQNQKIDLPTDYGTYTYDDFLGMTFKLVNKADCYVYDTEHNIWLSKLNDEAYMQQLVADSEELTIVGIVQPKADATSTILHSGLDYLHDLTYYVIDQAANSEIVRQQLADPDINVLTGEPFDAAGNSMLDIASLFSVDTDALKDAFQFDTSALHFDLDGAFDLTDDSFDLATLIDPSSFKLDLSGLPLPDMEMDMSELFDGVELNISQDGLQTLMKKIMNGYKRYLISNGLLNLDKIGFSSYMQTEAFQTLLAESMGDLLDTSGLEEQFAGTLQQNLQTVMETYSVQLGEALQTQLTAALQEQMGPAIQKLAGQLEQKIAQAIQSNIAQLSTQVESALKIDPAVFQQAIQINMTGSDLTEMIKSTLLSSASSYEKILDDLGYVDYAKPDAIYIYPNSFDTKAQVVNELDAYNASMRQQGEEDKVIHYTDMVGTLMNSVTEIVGMVSNVLVAFVAISLVVSSIMIGVITYISVLERRKEIGILRAIGASKHNVSQVFNAETFIIGLCSGVMGVVLCLLLLIPGNMLIHHIAGDVNVVASLPPQAALILIVLATLLTMLGGLIPARSAAKSNPVKALRSEMPVIHEITDLTAPELDIYARLTQAQLRNRLEPEKGIFIAESPKVIARALDAGYQPLSLLMERKQITGPAQEILTRCGDVPVYTADRELLAQLTGFALTRGVLCAFRRPAPRTVEQVCAHARRVAVLEGIVDSTNVGAIFRSAAALNMDAVLITPSCCDPLCRRAVRVSMGTVFQVPWAQIGTCPADWPENGSAQLHALGFKTAAMALSDRSVSIDDPALAAEPKLAIVLGTEGDGLANSTIAACDYTVKIPMSHGVDSLNVAAASAVAFWQLGRLMKKRVYTLYRVSTIGQVEKDDIPMQKEACHEFAERQGWEIVKEFSEKGVSGFKKSAKDRDQLQLLQQAAAAGEFDVLLVFMFDRLGRRDDETPFIVEWFTKQGVEVWSVNEGQQRFDSHVDKLMNYIRYWQASGESIKTSIRTRTRIEQLTEEGHYTGGTVAFGYKRVKKGRVNKKNQEVCELEINEEEAEIVRLIFQKYVYEGYGVKRICNYLVENNIMGRNGKNIPTTTLVRMVRNKTYLGYLINGNVEKECPELRIIEPEVFEKAQELRDARRREKGEDSDSYSPHALLCGKVFCAHCGNRLNITSSGRTRLRADGSTVKEKRFRYSCHYNVRHPGQCDGQSGYGVTKLDAIVESIVCTKFSEILECSKSKLLQDMLRKDMEVAQKEVSRAKSELDLKDDERNALKDEMIRVIRGKSSIDRDMIQQLLDENQAAIQAAQDALTAAQNKLEEIEQENKKAENDCSNLFTWASTYQNASFQQRQAILNQFIKEVRVGRDYDIEIILNVPLEEFEEFKSHSLSVRTPSGRKTDLKQAPVRGLGTPNGGIVVFDKTSGEAMNIMPKSSAHVTLRCQDEMTNMNVIPVSQDSYIVNGCKVKITYAEDGDSMEVLQKLIHDTLREEAKNYNMRLKNDTENFAASFNITPPYQMRVIHSSKLIYPREIYQRGVQRKRVELIAADFNEYVANEPKISFRNGKYYVVDGQHTIEARILRNGGRALPILCKVYTGMTMQQEALLFAEQNGHSAPLSAGIKLRAKVAGDDAPSKEFLAATNRVGLAFNYDSLQLSDYRISCVGTALKLYNEMGEKIYCESLRIIVAAWDGKPDSFRASVLRGMMHFVELYHGEFSEERLVRALGSVHPMEIYRVGRDNPAKLPGWKKYVFPIYMAYNGKGRKDALPMKFMESTLKFQRGDIYFVRLDNRTGSEQSGTRPAVILQNDVGNSCSPTLIVATLTSKTEKKATQPTHCLVEPEGLEPSIVQAEQIFTIDKSRVKRFVGHLTPEEMGRVDDAVKISLALNPMGSIQKLKPIIRSTAAYAPPEVVDGKPPVYPYTPIKSDFEDAGTVEEMMLYTELQSAVHAMIQRLEYSFTFNPSLLTSPKRKKQVTEILTEAEKYIWRIKEEIRCAMDELNPTVREQEIYEEMERTPEMIKSIRTLCATCLRHFVEAKAFKIAIVPSADNSMDTCTVCQTRHGYDYVVMHRMSFNKGYELKKFEAHWEKLRIEYAAAGMTEDAIQKMYDYDRQQFNSERTCIERTQELSNSSFECSEDETSPLMQKYMEATTIVDTYHETKSSFAWIGEIEDERLLTALEHLKKEDLEIITLYAYEGYSVVELSKVYRIAHQNISKRIARITKFLKNFDFEGAKMRQSDHEYEERSFGDIQRAIDFENSMNDLEAQLYYRRLSPKEVAKQVLRATCQFYDADWCGLIQVDLDLSLWTPFWWFNTGATDKTTLLTEEYESAEFLDRWVQAVRKGIPMVVLDAEVTKEAYPAEYNLYQRLGIRSVIAVSLEPRPVALLAVRNPKRYIQQTSMLRILAYVLLASYNEQKMLNRLQMANIPTSIQNSKDIYVSLFGELSISTSKGVLKEADFNSPRISRLISYLLISRKNAISPQEITQTLWPDDSDKPVKNVKGLVYRLRQKFSIISDEPLVLSSASGYQLNPELHIMTDYQRFDELVSSAVRASSVINKVDILKNALDLYHGKILSSADGEHWLIQFATKYHLSYMSAVSELLKQLDSLHSYDLLNQYAMKSLTIAPDNPKAYCWLIRSLKAQGMNELATNELAAAKEHLTTEEYEETLAFGVNWMKRNQNFDHNHSQKVLSCRYNMDTNRVEARFGDGTTLAIDCIAIEGKYGNTSAQRAELDWLLYNKPLEYAQLVLGGEIEHYLSLGCNHGRLEDMGYFAIIVIVVCGFLFPKMLIAALKSSDKQESPKYQLYAQILLAIIMLNIGLFLNTLLENLKMKKIARKEFLKIIGISMATSVFQILPSPTAYATDGKKELVSIDDMDAVQEAVGTEKEAIEAMLMSGELTRADLNEQLLSLKQQAVTDLQSRGYSESQIDIIKEYNESEDAFDYLYTPDETTGAMRSNATVRFLYGLAGNEGTRAVTIAYDIKWSERPILAYTDSFGIGWIAANENSIEVVTKVDDVTGEIAYFYSATEDSALLYSDVNIDTSKNGVVICTAPLLNHADTSTYGKHISGIINISTQSDSNNIDTVQIYVAYAHTTVKATFDWEVSLDFDKIGMSISFIPQPRTTIIAEGHATFWYNSQDFEVAPNVMNPAPESPFHILRIKNRNNNTDIDYKLYFYPLEIVTSVSIFRLIIDRIKSQESIAVHNFVTTERKLVTKSVMEHYLGEKLKKLRESRGWTQADLAKRLNKAVSTVSGYESDAHAIPLDVLASISSLFNISTDELLGLDAPEVLSLSGLTGAQKKTLIKLRNELLSPSQKGNDLSPQQMEILHDIIKAFGMLCDKKHSHVQWRDFKMNVLVCDDDQQIVDSIIEELKKKSEETHVSSRFYGFSQPSQIDLSLPYDIALLDIDMGETNGIELARKLRAENENIVIIFITNFIQYAPEGFEVQAFRYLLKADFSAKLDSYFDSAVQEVLQRKQLVTISINSEIIDVPVNDILYLESHRRIIVMHLLDEKRPAYQFYGNITELSEKIEPLGFLRIQKSYLVNMHYAEIFQYNKVQLRGGLCLAPSEKNYSELKQKYLHWRGKSRWMLMDALISLVYTIIDSVCVCLFLDAFASHRWRDHRFLVGVIVQTILMYASIEFNAAFLNRNQIIKILLILLSCFIAARALYKNITGKFLLFLIIIEYLLTYSLSFAAGMLATAVCGMDAQTFQADKTLSLIYGISYYSAELFIIALFRKIMLQRMTSRPRSHAQHSQLILYFLFPCASFVMLVILLYVTSGHNIEEFVSAGCCILIFISNIAILFLLERMEYAASEREQLLTLNQQIQLQSKSMASASELYSAQRKKVHDFRAHLNILNQLMKSQEYSAAEEYLGKITEQQSDRLFLVNTHHPILDALFNTKAAEATQKKISIDFEVNDLSNLPFDASDMVVLLSNLLDNAIEACQRYDKGDKAIHVMAVVQQDFFISVRNTSEPVVIINGFIPTTKPEPQLHGFGLANIRLILEKYSGEYTMFYENGWFQFTADIPLTPISMTKEVHFVTLLWKLRLNLCILCFKKVLLMRIVAMKDFARQLTQKCVSMGLLDESYSEWFAYSIEKRVTTLLTWLVQCLIGGFCFGWTLTISFSVFFLLIRKYTNGYHAATYSKCLFHSILLEVVLLASISYVFHTGLALLFLTIVSDATILCIAPVNNESIHWSTDEFKAAKTSVRWLLLLLNIFAILLARVQIAPSILQGLVAALTADAITLSISRCQNMKIQIKQFAKKKIEALVKRDMQEWPPVCAGWMYQPKRPCVPEKHLQEKRKMSIQMPFLLRKMLVGLCPIPFILHRSDAGCAFFQNASMVLYNKSMKDLNRRTFMKCMAAAATTVVVGQNVSSAFALDGSIIRRLDSADGAYAEQLAFEITSDFKKSPKNFLSQMSGFRKSDINQITGLLFYGYSYENINDLWVILSDLGETSSNLEVKTLSQSMSKSLMLYVESQKQIILSSHPSSTNKSIGIQPRSSTWKISVVLPTNRNYKGTLEIYSSSGSRVLSCACLGLAAGNGSMSQYKGNTPTGTYDAWLAGPHSNTTSYGPYKYVATTPKSGVVFDSNRSGIWIHGGDPAPTSSKGLPRYPLRPTYGCVRVTNGDQLVIQNVLNNQSQKTGVLEIIERDTMKRFQILILAIMLASLSACATNSLPSSSTESSVSISVSNPQDFLSELEDMETSQILEELKISDGGYTEDCFSVLSKRLVEFPEDTLCILKHNKLMADTDFEALVITGIGAELPYVGSDEEKKALHEYLKSASTSEEYAEISSKILDAWTSESNAFMNNEIGRRDFMKLSAASIMTASVALNFGNTAFAATASENPKDVLKNFFESFSPTDHESWVNYFASSVYGYYRQFAQNAFNQAKRLGLLDINKAELLYAEKVNNVYAPKYYEFNQYYDSGTNYACYKTITDMETETGEYFGNGTNFSLVLMIREASGWKIGGICKCPRDLGSVPAGITVSRQSYGFVSYQSQPSYIKVKDENGTVKNVAFSTYLKNVTYNEIGNMGYYDEAIKANVMAIKMCGWWAHAAGYRSAEGCDIKYGDVAYKSSYQTKPAITNAINAVDGKKLVSSGGQLFFTSYFAGSSDTAGKNSGRLRQNGSNYLASTKSYTYTEILHYYYDNSSYNNPSVGIVKINMKNKKAFWMMLTGVVILFGVFLFLKDKKIPSHEIEFAAQESGQSSGMISITLPQGWEFQEKTKKSDTEHEPLMLAGLNPLYTVYDIYDSDHTLIGAIGYSNYEPYEGDKDSVQVVYSALRLGSVYRFDTDSRYDVVKTNKYGTTALTTVVYQDGANAEPVNNWGILSYNNEKECFVAVELESNSVSESQVLEIAKSIEFMAKTKAEEKALNLDQILFNCRVYLRAARNSGSFFEKRDIPRSTAPKFSKRSWNRMLVGEYPKPLCSAFSNAGYASLRDAFEDVNRHISRKIRFLFGVRVNRRIMRFAHEHSEKELLNVDTIHLLPGEERCVDFRDANGVPKVHYTYCSIRGKLFNCTCCTKAEAQRLCEDWLVKQDRCYINMALAATRLIPMRKNKGKSIGACLHNHTSYIQNPDKTEQGELVSSYQCSPLTVDEEFLLTKRLYEQTTGRSQKSDVIAYQVRQSFKPGEVTPEEANRIGYEFAERFLKGKHAFIVATHTDRAHIHNHIIYNSTALDGTRKFKNFWLSSFAVQRLSDLICLEHQLSTIEYKPYRERQKRIVYPPKESNRDRLCGIIDIILAEKPKDFEVFLQKLEQQGYEVKRGKHTAVKGKGQKRFIRFLTLGTGYGEDEIKAVLEGKAKHHPYQKQPPKEQSFQLLVDIQGKMAAGKSVGYKKWATKFNLKEMSKTLLFLQEQKISSAEELRERAAAAMERYDAMGDSIKAAEARLTEIAVLKTHIINYAKTREVYTAYRKAGYSKAFLEAHREEITLHKAAKAAFDEAGLQKLPKVKELDAEFAELLTKKKAAYPDYRKARNEMQELVRAQKNVERFFAEEKDTIEKAQTRMSKQKIEDYYFEHNSTIFSEMLGEDEEYLRLKKAKRAAEESLQSVISKEAWNQYLALDEICNELECARYKAMYLAGAADYEKISKMMSMLKKIVLFPISLFVAFLALMARWLLTLSSYVVAPLMLYIFGCGIYTAYRQTWDQFFILLVAEFICFILFFGATAITEGIGRFSEWLAELMKEKRDETIILRLSKTEKNRIYEKMLTMGIRSLSAYIRKMALDGYCLHLDLKELQRMAYLLQMCSNNLNQYAKRANGCGKVYAADMEDLRQRLDELIDIGKQILSKLAELADTENKKAELFSKVRSGQVRVLLGSTAKMGAGTNVQTLLVAVHHLDVGWRPSDMTQRNGRIIRQGNQNKQVYVYNYVTESTFDAYLYQTLENKQKFISQIMTSKSPMRSCDDIDEQALSYAEIKALCAGDPRIREKMDLDVQVAKLKVLRGDFQNQKYRLEDKLLKTFPEEIQKQKTRIAALRQDSQIAAAHPQDKENFCGMTIKGMVYDDKKAAGERLLLARQEMPNADMMLLGTYRGFELNIRFDSFKNEHQAVLRAELSYPVSLGDDARGNITRLDNAIDNFADRIADAENALQNLEQQKQAAEVEVAKPFAQEEELAEKSARLSELNALLNIDRDRSSSQDAPEETEETETPATRPSVLAALGEKTNQPEPVKPFRSYYDKDGDARMEWNMAGYHIRFQIYCNRQVMNAVGIDVSKGKSMVCVMRPFGEVVLEPFEVLHTAQNLNDLAGKLKDLDGETRVVLEATGNYHKPVAFVLHDAGLFVSVVNPVLIHDYDNNSLRRVKTDRKDAVKIANYTLDKWTRLRQYLPEDDTRLALKNCYRQYQQAVAIRTMLKNNLISSLDLTFPDANKLFSSPAKSNGCEKWVDFIGDFWHSECVSSLSEETFAKKYLKWCQKHGYNFTRLKSDEIYACAVSAASLPKSPTSKLLIQQQVAQLKAVSQSVAAFQQEMLRLSQQLPEFDTVMEMYGVGPSLGPQLMAEIGDVRRFSSKKSLIAFAGIEPQPNDSGKVVGNDKGISKVGSAVLRRTLFLIMAAILQNQPQDEPVFQFMNKKRAEGKPYKVYMMASANKFLRIYYARVKAVMDSEYSQKIKAMFAMLEHHKPAKDIYDDGRLFLDFSEQTASLNGKPLTLSPMEYKMLNLFRKNPRQVLTRGQLLEKLWDIDERFVDEHTLTTSISRIRSKIEADGGAPYIKTVYGMGYQWTGGEAKMKFQNLSVKRLFGRVAMELVLSMSGITINLNDFNNMKYAWVSDWYRQAMNNFWIPEEINLSQDVKDYPRLLSAERSAYDKILSFLVFLDSIQTANLPNIGAYITANEVNLCLSIQAFQECVHSQSYSYMLDTICSPVERNDILYQWKTDEHLLRRNTFIGDCYNEFQERKDASTLLRVMMANYILEGIYFYSGFMFFYNLSRNGKMPGSAQEIRYINRDENTHLWLFRNIITELQKEQPELFTAESVQALREMMREGVEQEIAWGHYVIGDDIPGLNRQMISDYIRYLGNLRWTSLGYPALYPGFESEPESMEWVSQYADANMVKTDFFEARSTAYAKSTALIDDLAQEERDHAMLFYQYLQNNGEDVTFEAVAKPEWERGDHMAPLKKALEHEMLITASINAIYAAAYEVRDFRTMQMLDWFIKEQGEEEKNAADLITKMDLFGGDSKGLYMLNSELKARVYTAPSLVLMFKEAADIKTSDQLHLPVPDAKFETVVVKPSEIQQDMVQALSERAAEVHSGSVDPSVDNMLKITSDGRKIGLDQRLMNSALPDDPNSKLNACVNNVRHEVTRDFLADNLMNLEKLPKTSQLCEQKGIEIIEAEACPDHIHMLISFPPKYSISYVMGYLKGKSSLIIFDRHANLKYKYGNRHFWARGYFVDTVGKNKKKIQEFAPFLNIMNEWYAKDTSNKIKAVFDARMKDGKRCSGSIPYGYNRLPNDKQTLVVDPVASEVVKRIFLLANEGKSPRTIAELLTEEKVLIPAAYAKKYHPEQYNGTKFSNPYLWGTSSVRTILGRQTARAPWVPQARRYYYNIIGKYGAQVQALLKKISALEIKTICPLHGPVLTEGLEECLRLYDLWSQWEPEESESILIAHASIHGNTEFIHNADTENKKAELFSKVRSGQVRVLLGSTAKMGAGTNVQTLLVAVHHLDVGWRPSDMTQRNGRIIRQGNQNKQVYVYNYVTESTFDAYLYQTLENKQKFISQIMTSKSPMRSCDDIDEQALSYAEIKALCAGDPRIREKMDLDVQVAMPLTQPKTDLAYLRSEKAKAEQKLRSCQHREKILERQMSELNRRERVHRLCTRAGMLESFLVCPGELTDDQVMELLKISFRQPEVVLALAKMVHDVHERSNVQNPLEMRFQSIRIKEGLLERTINFSDGANLIHSTKNSCGKTTLLRLLLYSIGYNIPSTKRMRFDQCEVETHLYCDALGEVSVIRYNKDFLELTHGNQKSTIVLPAQELEFHKLLFGNCNDDILLNLLGTFYIDQEKGWTLLNRGTVIGSIHFNIEELIRGLSGCNCNELLAEENRLTRNISKYKQMFSIAQYRDQVAADMGSLAPESYNEYATSEIQQILFQIGGIKRELKRVDRALSSNKNFRKFVSEMNLVVQDESGNQIPVTEDNIIGLNDSVELLVSKRKMLSFDLATLENQLEQKEKVKAAENEQMSFLTSENLAEVFDKRIVSTPMNSVVIKDELDKSEKKLKSVRAEIRELTKSNNAVVMSLYTDILRYATEMGVGDDDTISPSYLFTSNLKELSGAVLHKTVFSFRLAYILAVEKELGIKLPIILDSPTGKEVDQENIKMMMSILKRDFSENQLIIASIYEYDFDQVNRIEIEDRLIPIKMDDEKELASRRADQVMFGFEFQVNAAIILMLRNIKSLDTIRIEGNYEDIELQLTDGEKILAQAKGVQLGSSNFHNVRANLKKALKTLSEGGNKATNVKQLIFITNSFNPFNDEASKGIFSGPPSYRTYDSLPDSSKKIIDDYLAKIEHPLDTEKLLIQTLPFETDDEDERYKYVLKAVEEFAEDLHLSSLSMGKKLMQAWQNDLQRNGSKKNVAIRVSKKEIIGPILVIITDIDQTSEKFIDHLDSDIYDEVISQYKGLITDCCEKYEFFKDILREYISYKNGAEHKSRMETAFGFVDSYWEKYTYMFDDTGIDEEVQEILIKTILYNVITKRNKIDSVKSGVNLMGTPIDIWLVGNTGLRNPNRIKDGFSVFAESSFVGNLRGRENDIAFMNLLNEKGIIQNEGGKDESGSHARKWRLMFSKNGLIYPKLDKKYGEQAALGKMDDITPFGRVFLKADTYPAVQECFLRAMSVEQFPLAGESSYFSPLRWILAIMLELEKRTGSSELSRIEFALWGHTTNPKYSLSEVVDNILDLRMRRAKAPAKKTFDRQEIAVRAKDYDKKSDNFLDYSDMNMRYLRISGVLQRKGRGLIISPAKHVLAEALAKSTANDKPLIEEYRILCNGAPLPTDNEDVAKSVLNDLMRQMKERRIAFDISDLPLDTPTEINIARRRLESVIAQTDEIQYAQAQCNQWKEISDYMTLLIKGGGKTVYDEDNAIEVPKDETPAYLEWTLWRASLAIDHLVNMPYEVRGFKLDSDFMPVSAAGGGKGDLYCEFEDFTILTEVTMSTSSRQEAMEGEPVRRHVSDAVLKYDKPVYGMFIAVRIDTNTAETFRHGIWYAKDDVKQRLDIVPLTLAQFQKYFVAMFEADKATPQTLCDLLLECESQRDVLEAPSWKKYIDHTVSEKSKGLKTAVMDNTARTLSYIQAKPILKWAGGKTQMLNDLLPKVPSSYGRYIEPFFGGGALFFALRPENAIIADSNPELVNMYRQVANNLDDVIDYLKKYKNTSEMFYQVRALEWTELPPAEAAARTIYLNRTCFNGLYRVNRKGQFNVPYGKYVNPKICDEENLHAVSKALQKAEIVCGDYLLVLEHYAKPGDFIFLDPPYLPISEYSDFKRYTKEQFYEEDHVELAKMVMRLHDMGCSVVLTNSNHPLVHELYSPFKIDVIQTKRHISCNGKSRKGEDVIVTVPPKHKTLMKLAPQPLPQQVSCYPPTRFMGSKSKLLSQIWAIASQFEFETAVDLFSGSGIVGYMFKAQGKSVISNDYMAMSATFTKAMIENSHVTLSEREAKELLAKKKESDHFVATTFKDLYYTDAENELIDILRTNIAGIKDSYKRAIAMTALIRACTKKRPRGIFTYTGNRYNDGRKDLQKSLEQQFLEAVEAVNAAVFDNGMSCLSKHGDAMELRADKADLVYMDPPYYSPLSDNEYVRRYHFVEGLARDWKGVEIQEHTQTKKFKSYPTPFSTRKGAADAFDKLFKKFANSILIVSYSSNSLPTQDEMLEIMARYKKHVEVIPVDYKYSFGNQGEAKTHRNSVQEYLFVGYMSVSYKKLWKLLIDRDMKKKDLCVAAGISHTSMAKLGKNENVTTDVLVKICTALQCDIGDIMELTAKNEDMFKLETMIYASEDGTSSVFTLNPALQKQLDTLASQHPEVCCRKTKGEASGVTYQVRNAAVSILPVMKLTFEEKKLLYTYGCADLELTRKRLYGVAGLTVDPNQNKMVYDFCRKLEDETLADWYDQMFYFVRAEMECYTNMLLLMQDIEEDEDWGPTIFDESEEGELIDDVMTVLKPMLKLALFPLLLLLILAQWAGIFLTTFSSVVTNLLAGLFFFVALASWIMKLADGGEVLKMLITTFVVFILPYIAIAAIAKISFFADELRDFLQSMTTMKNSIHDNANGLDYTLVNDHYLPNLTVAAPTEQHPTGRWGRLHKVYLKEQHPVRYNQLLLSGVLGSYLAKLDKQAEEQLALTVRQMQEAEGVTEALKAADQLEWVRRMNSIRNHAEEIIKTELIFVXXXXNELVDKIVVYEAEGAGNARTQKVDIYFNYVGQVDIAYTEEELAELKAQKEQEERQRMEKQRKREKAYREKRKAKKIAENGGEIIKTKTCPHCGKVFTPTSNRQLFCSRECWNQARLEQKKADREAERGTHYYRQRTCAVCGHSYWPTHSQQEFCSDECRKIDHNRKTLEFYHKKKGNLKRDPEATPTPKPKEDNAAMNYSAMIQNRRSVHAFCEKEVPSEAIGQLRSYYEKTCPRLVPEIATELIVLDKDAQPALESSAGYNQFLIGAPHYLLLMSAPHSYAAINAGYMMEDLVLKLTELDIDTCWMTFTDSDKIKKALSLATPLEVAAIVAFGYGEKTAKKLRLNILSMSQIDVRAEQQYYAPKKGVHDLVHMGSWSNKSGLDEMIDFYDDMLWQSFYAASLSPSYLNRQPYRMLFQTTSAHEELRAKIRSFAEEEIKPLAFLMDQNNEFPEEAVKKLGKLGWMGIPYPKEYGGAGLDALSYAIAVEELARVDGGTGVILSAHVSLGSWPIFAYGTEEQKKKYLVPLAKGEKIGAFGLTETNAGSDAGGTETTALDKGDYYLLNMNNNHVYDMLVVGGGPGGYTAALYAARAGLDTIVLEKLSAGGQMALTEQIDNYPGFENGIDGFSLAEKMQKQAERFGARSEYAEVLRMDLTAVPKLVETSEGIFRGKTVVLATGADPRTLGVAGETELLGRGVAYCAACDGMFYKGKTVVVVGGGNSAAADALLLSRVAKKVILVHRRDTLRATKSYHEPLSQAENVEFRWNSVVSALLSGDRLTGVRLRDTVTGEESVVDCDGVFVSVGRQPATALAVGQLALDGGGYIVAGETTETSVPGVYAVGDVRTKPLRQVVTAVADGAVAVHMAEKYIAENRMAAMNMNQEQFEQAIREKKPVLVDFWAPWCSYCRRIGPAYEKIGEEYADSLAVGKINIDEEPRLAGAEGIEDIPTLVLYRNGKAVDSIIAPGSKAEIDRFIQEALAKRTKLEEMKDIHLYETVVSLRGALNQTSEAQMDALVAELCAEMPKEPKITALYERLSRDDDLAGESNSITNQKKYLEDYAQKNGFKNIRHFTDDGFSGVNFNRPGFQSLIKEVEAGNVETLIVKDMSRLGRNYLQVGFYTEILFPQKNVRFLAINNSIDSNNASDNDFAPFLNIMNEWYAKDTSNKIKAVFDAMPSKTEEYLALAQRTANGLTRYWESWTDYLTTASRLYKYPFTDQLMIYAQRPDATACADYDVWNNRMNRYVRRGAKGIALLDESSGFPRLHYVFDVSDTGVRRNSRDPEVWQYNDDLKQPVSEMLAATYGISGERVSQQLADVAGKLVADYWDNNGGDIRAIVDGSLLMDYDEAGVEMQFKSAAAISVTYTLLERCGFEPTAWFDKEDFRAIHEFSTPDAVFALGAAVSDMSREVLRNIERTVKTTIRRRNNERSQHEYEQQSELHADRGLSSPEPDPEPAPEAAGQVRQTAPDLPDAASPGAVQFDAPERKPVPDSVRTGADRSSDEGADDDRTAGEEPGPGQRAESDGVGAAHEQPAGAGRGSNPDRTDLQLSFFDAHIPTEAEQIETIDRAESEKTPSAFVLSQAEIENELRKHGSGFAGGKQRIMALYQTLPDRNLRAKALAKEYGIGGHSHDFLDGSRGFVNHDWKGLEFDHYPDHQKITLKWAQVEKYIDLMVQSDRYLTDKEKEHYTPPVPITVEPDATLTHAKNLIRDFCLEEYDSEPDFSNLSKIGIAYTNATDEEIPIQVNVDLVGYRVERYLGDILVDERQYESLEDLTETELEALDFSELVSVTDEELEHYHSKAEERPALLPLDAATEYNALKEQHPDALVGFEQNGQFEFYGEDARKICELVGGKLLEKETALGTVPLTGFPSDQWAHRAKQLWQCGENVYLAGLNEDGTHHQTKYLRREDYLPLGATVHMEGRAFRVDNVNFDKGSVSLQDVALAEMRMPVFREEPLALVRELYEQEQDAMEHPLPDYKVGDNVIVDLPTQTIEGTIGYVGETDVRIDTSAQGQSWDNEVINKQQFEDGLRQNEPNSTRPVRTEKTVAVYPAKENNLPFDIVIQTISTESPTVEAERPTLELAGNFHITDDHLGEGGAKQKYARNIEAIRTLFKLEEEHRGATAEEQQVLSQYVGWGGLADAFDPGKDSWAKEYAELKGLLSEDEYAAARSSTLNAHYTSPTVIRAIYDAVERMGFRSGNILEPSMGVGNFFGMLPDTMQGSRLYGVELDSITGRIAKKLYPQADITVAGFETTDRRDFYDLVVGNVPFGNYKVNDKAYNKLNFSIHNYFFAKAIDQVRPGGIVAFVTSRYTLDSKDSAARKHIAERADLLGAIRLPNNAFRANAGTDVVSDIIFLQKRDRPMDHEPAWVQLGKTADGIAINSYFADHPEMILGKLTTESTQYGKEEATVVPIEGANLADQLRDAVQQLEGQYLEAVAEVPDIAETEAERRTLPADPDVKNFSYTVVEGDVYYRENSVMTQVELSDTAKGRVTGMVELRQIVNDLIQQQLEDYPDADIKATQEHLNAAYDAFTAKYGLLNDRKNGRLFEQDSSYYLLCSLENLDEQGQLKSKAAMFTKRTIRPERTVTSVDTPSEALAVSIGEHGKVDLPYMAELLGTPGEYGRITTELSGVIFKDPAADPTDPEAGWQMADEYLSGDVRAKLRMAQFAAETNPEFVVNVDALTKAQPRELEASEIDVRLGATWLAPEIIQKFMTETFQIPYYLRHAVKVRYSPYTAEWRVEGKTATGRGDIISSETYGTSRANAYKILEETLNLKDVRIYDTIEDAEGKPKRVLNKRETMLAQQKQQVIKDAFANWVWQDPQRRIALVKQYNELFNSTRPREYDGSHIHFVGMNPEIILREHQRNAIAHVLYGGNTLLAHEVGAGKTYEMAASAMEAKRLGLCQKSLFVVPNHLTEQWASEFLNLYPNAKLLVARRKDFETANRKKFCARIATGDYDAVIIGHSQFERIPLSFERQERIIQEQIYETLAAINELKAHAGENFSIKQMEKTRKTLETKLEKLRSDERKDDVITFEQLGVDRLFVDESHAFKNLFLTTKMRNVAGLSTSEAQKSSDMFGKCRYLDEITGGRGVVFATGTPVSNSMTELYTVMRYLQYSTLQQKKLTHFDCWASTFGETTTAIELAPEGYTMDTTKRSPIDRLLFATFLKGRTSSREILNQRGEISPEENQKIIEETNEIINDDSTYPFISYLSDLLAKSKPSDEAVKKLHDCIEKVAVALGQDSTDVFRVLLAKLIEEPEEKQTFDRLLEMAEKFAAKHEMEEVINGILIREVETKNIMTKSSLPVGGYSVNPYVGCTHACKYCYASFMKRFTGHTEEWGTFLDVKHWPKIKNPKKYAGQRVVIGSVTDGYNPQEGQFGNTRKLLELLIGSDADILICTKSDLVVRDIDLLKKLGRVTVSWSINTLDENFKNDMDSASSIERRIAAMKQVYEAGIRTVCFVSPVFPGITDFEAIFERVKDQCDLFWLENLNLRGGFKKTIMDYIAEKHPDLVPLYDEIYNKHNRSYFEALEVKAAEMAKKYDCPFVDNEMPYGRVPQGQPVIVDYFYHEEIRGTENTGKRNRMSICIKEQIQNMNIVIGCTVGCTYCYARNNVKRWHMIDDFVDPEFFPGKLKMMEKKRPQNFLLTGMSDLSGWKPEWRDEVFAKIRENPQHQFLFLTKRPDLLDFDTNLENAWFGVTVTRKAELWRIDALRKNIRAKHYHVTFEPLFDDPGTVDLSGINWIVVGTMTGAQSRKIHTEPEWAWSLTDQADKLGIPVFMKEDLVPIIGDENMIQEMPEEFNKVLEVQKSWKKMKTNGGFLVTKIKQLGDRIFEKILSEKNIDAFNGAQGRILYVLWQENGISIRSLSVKCGLAITSLTTMLEKMENQGLIRRVQSETDKRKTLLFLTEKAHSLKGEYDSVSDEMGSIYYKGFSEEEIAQFEEYLDRIRKNLEGWQESMNFNHEELMLMMLYNTGTRLGLVQELRLMQCYLMPDETALRELSEGVIEKLKLLTDAEFAELEFPLDMKDDAVIKDNEAVYLLNEQTYLHLRENLAGVGYEVFDKNSPLPVEEGQIPREALGNTQRRIETARAYYLAEHPDEPVGRIQNVAVTTLEKFRSGVRKRRNLAPRSLPENDVRFIDPMYNELFRVPDGGVVQMTYPDGHQRSEKVEYLDDYHMKIGSSVQHICEFAERMARSRAIVEPEPLTQQDCRAWNLEYDYYLTVQADNGSWNYALYQGDCCLLERGKIDAPELMIEEVRDEIMYTHNLRNKDCIPLTQEEFTQKLADRNEIQSYRMKQFQQSGHDCYLVMQLQQDADPALRFAAMRYLEKKNIAPSIENYEILHRGNLPEGKRSVPQAELLEQLYQKFNFARPTDYHGHSLSVSDVIMLNQDGKISAHYVDSIGFEELPGFLDKKPERTSVLQTLKEKCDAPECNPTICRKARAEHELMSYAKVLGATSRQDGYLEGNGYLVSWCVGHLVELAPPNVYDAKYVKWSIADLPILPQKWQYLVSASTKKQFGILQKLMHRPDVESIVNSCDSGREGELIFRLVYQQAGCKKPFSRLWLSSMEESAIREGFARLKPSTEYDALYNAALCRERADWMVGINASRLFSCLYNQPLAVGRVMTPVLAMTVVREAAIAAFVPKKFYTVELELTSGCTASSRRIPEKSVAENLLEACRKEMVATIQRITRKEKSENPPSLYDLTTLQRDANRLLGYSAQQTLDYVQSLYEKKLTTYPRTDSCYITDDDEEMLEELTEALERFFDITPEDVDEAVPRTRRTVNREKVTDHHAILPTRSMLQADLDALPKGEQNVLKLIIARTLMAVSKPFRYLETLLTTECAGEEFTAKSKEILEEGWKAVERKVLADILNRKQELTALPNAAENECGILNAELKEGQTSPPKHFTEDTLLHAMETASADSMPEGVERQGIGTPATRAATIEKLVQKGFLERKGTKKTKVLLPTDKGKALITVMSEEIQSPEMTADWETKLLQIERGEMEPSEFMTEINTMITELVKNTKMKKGVNALMKNKIIGVCPNCGANVVEREKGWFCESNPCRFVLWKDNAFFKRLGKRLDAHVADKLLRDGRVRLKDCKSAKGKTYNATVLLGTEVDGRSKFSLDFEGGCMKIKKLGALLVSAALCAGMAAPAFAFEGEAAPVEQPVLPEVVEEDVVTVTDETAGALTPEGNLTLVDDYHTDYSDGSGQQFITLVSKSGATFYLVIDRNAKGQQTVHFMNLVDEADLLALMEEDAADAYTAEKEAVAQAEQDRLKAEEEAKKAAEEAAASGTEQPKENKVTKIASGFLGVVVLIALAAGGGFYVFAKQKQKKQAEKEALDPDANYTEDKGDFEIPTDVPDEDETPDEQDTEPIMSEKSDKLRAMLAKEKERRIKLNNRIEILERRIQEEDSAEVNEMVRTAKVTPEQLAALLRQSATATPNPAALSAVGATFEKEVDADEDMSEPKLNTKEETSAKKTRSPPKKAKVEQTVPKKKKLKTDADKAAEKAQHLRFGKAELTPDELSRLSKAQKREMYAAHAARSAVHREVDQYEDDNVGTQALSEGEKAAGNVRDISKSRYARKLKKKAKAQGKKDTKTARFSAQEPTAAQDAGASSTGEGGSNWLSRWKQRQEIHKSYYAAARSGTAAQTAGGKAVSNGASAARSGVEQAVEKGKTAVSTAVKGLMNAAKGNAHVLVIVGVFLLLILMVMSGFSSCGILFSGGTQVSGQTMYSAEDRDIRGAEQDYKKLEKELDKKIKRTPTDHPGYNEYQYHLDPIEHDPWQLTSFLTTLYDDYTRSEVQSKLKETLKKQYKLTTWVEVQTRYMTVWVMTPAGIPVPTQVPYEYRIFHTKLVNRGLEVVIREELNNDQWKRYEIFQDTLGGRPYLFNGGLPPGGSDGSGTPGIDYQVPAEALTDSEFAAIYKEAQKYVGTPYVWGGSTPETGFDCSGYVCWVYNQNGYDVGRTTANGLWQKSQHISEAEAKPGDLVFFDGTYDTPGKSHVGLYLGNGMMVSAGDPIKYANIHSSYWEKHLAGFGRLSKMQRMFEDGTCRVKPNYYTRTIAYQDINYQLAQQEDKTAIFEEWCSFLNFFDSSIKFELSFVNMATDSTEFEKSIRIPYQKDGFDDVRAEYSQMLRQQLAKGNNGLTKTKFITFGVEGESMAQVKPRLDHIQNDLLNNFHRLGVQAKPLNGVQRLKLMHDMFNMDGASKFHFDWKDLVKSGLSVKDAIAPTAFAFKNSRTFQMGGIFCAASFLSITASDISDQLLKDFLDMDSSQIVTMHIQSVDQNRAIKTVKRTITELDRSKIEEQKKAIRAGYDIDIIPSDLATYGRDAKALLKELQSQNERMFLVTFLVLNTGRTEQELENNVFQASSIAQKHNCNLCRLDFQQEQGLMSSLPLADCQIEIQRGLTTSSTAIFIPFTTQELYQSGKESLYYGLNALSNNLIMVDRKKLKNPNGLILGTPGSGKSFSAKREITNAFLVTDDDIIICDPEAEYAPLVERLHGQVIHIGPTSTQYINPMDINSNYSEEDNPLALKADFILSLCELVVGGKEGLQPVEKTVIDRCVHVVYRKYFENPTPENMPLLEDLYNALLTQDEPEARHVAAALEIYVKGSLNIFNHHTNVDIHNRIVCFDIKQLGKQLKKLGMLIVQDAVWGRVTANRSAGKSTRYYADEFHLLLKEEQTAAYSVEIWKRFRKWGGIPTALTQNVKDLLASPEVSNIFENSDFVYMLNQANGDRQILAKQLNISPHQLSYVTHSGEGEGLLFFGNVILPFVDHFPKDLELYRILTTKLNEISEGVQKMAAYISVPRDLTKVKSKVAFNLTKRQLLCFGTAALIGVPLFFVLRDSGGSTAATLGMMAVMLPAFFLGMYEKNGQPLEKLLSHYVQARFLRPKIRPYKTNNYYAILMRGGSANAVLEKDRMETVLKAIADWIKGILTAGIMSNLSGLFDDVNTQVGNIAQQVGTKPSSFEPRVFAMIEALSRNVVLPIAGIILTFIACYELIEMITQHNNMAQFEPALIMRWIFKTAVSVWLISNTFDIVMAVFDITQKVVSDSSGIIAGNTRVNDIGLSMLEASLMQMDVGPLFGLFLQSFFIGITMRILSIIIFVIVYGRMIEIYCMVSLAPIPMATFGNHEQSHMGQNYLKCLFALGFQGFLILICVAIYAVLIQSVAISGDAINSIWSIVGYTVLLCFSLFKTSSVTKSVLGAHMGRTCINIIAIADCQKQSAFLFSSASESIIPYGGLSNKGALCSLQFYMNDYKPYKQLKQKQKAKVVEQMYKELHQFFSDNQRFPDTPDEHELLARQIFSHIPYHVSFDEFYAVYNKKHSAIEQRLAEKGLPEHLLHREERRQEKLNRPAVKMTKPHRKKKKKQVFEPLVEQNDDFFFIAGYTSGGAPYGVTWEEMGLEPWEELVMTEKQKNDVLYVCSLIETIARKTKNHRQDVIRHFTKAAIERQLRLAEVNHCLSFEQVSDELIEDFNIPDGDFDTAAECRYTVPSATSIGMLYQGLVLSTMKDEDAAQAILDVFSSFITDEISDFNSNVYYTNPDYLRCSYLEGKMLAMSEILLYHGSKEAVVYPEIRITRYTKDFSWGFYCTNNYQQAYRWADRRSADGLVNVYRYVENPDLKILRFPEMSDEWLDFIAKCRAGETHPYDIVEGPMADDTIWDYVNGFTSGQISREAFWALAKFKHPTHQISFHTVNALHCLTFERSEPIHDRKAEKMEFFNSAIEVLQTLVVALGAGLGVWGAINLLEGYGNDNPGSKSQGMKQLMAGGGVALVGITLIPLLSGLFGMYDELQLDTLGDKKTALFLIMSDTDSTFNFLISMVYTQLFNLLCDKADDQYGGKLPVHVRCLIDECANIGQIPNLEKLVATIRSREISACLVLQARSQLKAIYKDNADTIVGNMDSQIFLGGSEPTTLKELSEMLGKETIDAFNTSDTRGNSPSYGTTFQKMGHELLSRDELAVLDGGKCILQLRGVRPFLSDKYDLTQHPNYKLTSDYDPKNTFDIEKYLNRKEKINSNDEFVVIDADSLPSAMLYTEKEKHEIERVKEVFAEHLRQSPDFELLWSDKVGYVWLTIGVNPVYVDTGIRIESAADLCGRCLDDVATDVLYMTGNDHALEAADPLELAEIKRRWEPYINQLPDYAYLCKDLLNGKMMNKEPHTMQVADAVTASRAPENTPAMVKKIGKTTYKVHVHFSQTSTETMSDKIKRMLKNEIQQMMIEITAEIRALIDKAAAGVELAGDEYIDPSDGLIHCKKCGGQRQTVVPCFGKSGYFMPRCICQCQREAEEQRKAAEERQRRMERIKHRKAQGLQDRYLYDYTFANDNGQNPLMDKARAYVENWKEAYKSNIGLLLFGDVGTGKSFFAGCIANALLDQDVPVLMTNFPTILNRLTGMFSEDRSEFIASFDEYDLLIIDDLGVERSTEYTMEQIFFVIDSRYRSRRPMIITTNLKLAELKNPPDLAHARIYDRILERCAPILFDGKNFREENAGATRQTAKDIVNSKHDMSDNRKYYYLKLKENYFDDDSIVLLESMQDGVLYSNILLKLYLKSLKHGGRLQLDEDIPYTAQMIATITRQQIGTVERALQIFLKLGLVEVLDSGTFYMSNIELLIGQSSTEAERKRAARLQNKALSAPRTNGGHLSDIRPPEIEIELEKEIEKGRSARAYGRYQNVFLTDEEMADLQASFPTVWGQYIEKLSEYMASTGKRYQSHAATIRRWAGEDAKKTVTPSRNRDYSVKEDETVMKNDKTEPIPVMDYRQYRRARRLVHECCNYIDGNCIALDDGEECVCVQSISYSLLCRWFRTAVLPQDKELETALFHRLNAKKCAVCGALFTPGSNRAKYCPECSTRMKRINAAKRKRKQREKCHALGAEKPLMNLLLNIRAKYCFLRANGIYYNCQQKGVDRMAGNTTNISIRMDADLKAQADALFTELGMNLTTAFNIFVRQSLREGGIPFEVRLEQPNKETVAAMLEAERIAKDPSVKGYNDLDELFADLKRMKETKYTVKYTTSFKKDYKRAIKRGLKIELLEQVVALLAMGEPLPDKNRDHDLTGDWVGHRECHILPDWLLIYRIEDDVLVLTLARTGSHSDLFGKMFPIDFCHIPVSIIKRSAGRSAVAAAAYRSGTKLTNEWDGMTHDYTRKGGIVHAEIMLPAHAPPEFADRSILWNSVEQIEKARDSQLAREIEAALPRELSGEQQLALVRAYVKDNFVDKGMCADFAIHDKGTGNPHVHIMLTLRPLKENGQWGAKCRKAYDLDENGQRIPDGKGGWKNHREDTTDWNDKENVEIWRAAWAAYTNRALESAGRPERIDHRSYKRQGIDKIPSVHLGPAASQMEKRGIRTDKGEVNRQIAADNKLLKEIKARITRLYRWSKAETEKPQTQQSSLTALWEAQQQLNAPRTRTGKIRALQESATLFSFLQANGIQSMQQLHEKIADMNSRYYDLRGKIVKAERRIAILTERGEMWEQYNQYKSIHKQLAKVKPEKREQFEQRHSRELILYDAATRYLKDLKDNGEAITPKAWQREIDQLTAGKQTDSIDMKAMREELKAVERLRKATDQLARQERDKPRDRGPERMHDINEKITAHPQKEEREKVLKEIRQLENRKKILENKQRNEERKARTRRLIERRAVLEGIFPLAPDLSGAEVKAFLIALSHLPGAAELTANLPKSGDTPMQTINLKQYYPFCKEDIFVEVSDEIVEAFLLDKRAEAARDRKMFRYKAFYSLDCNDGIENAAIGWAQPSPEDYLIEKEELAEYEELIRRLYEAISSLPPMQARRVHARYMLGMKVKDIAAMEGITPSQAGKSIHAALRRLRRYFARQKWTVNLMKTINLRWMYPHYRHDEFVDVTDEVWEAIRQAQREVNNYERRTVYHRAYYSLDAYSWLENYALEHSRSPEDILLEREEMATRLRLIAALPVALAHATPTQARRVHAYYIAGIKQPEISRREGVHSSKVSVAIHRGLRNMRRCYDGFFQTEMEVTINYNGQAVAVEVTLEVYEFLDRADHKTENLFHEQRRHWDGREFDEYIITTEGVGAYGETPEEYLCRMETLHELMAVLDTCTEAQRRRFLLYALDGLSLAEIGVLCGCSKVAVYQSVEAVRKKFINFFENRLNEMLTRCSGSTGTKKRPDGIKPYERNGIYFAVWLHGIVHTAGRIAPLLETGFFMYWKLAIQNIRRNLRDYIIYFVTLTLTALCDVLLFRDELFYYESFGLFAVLILVQLAATGVAAFHIYQEKRKKIEMYAKLIFKNAKRSVKDYLIYIVTMTLCVTLFYAFLSISSTHYHPTIGAEYNISLLAGGMKLAICGISLLLLFLIHYVNRFMLRKKQSEFAVEATLGMEQKTIGLLFLGETFFLLIFSVSVGILLGMIVSQVITAMLLASFGEPYAFSWSFFPDTVLLTVGFFVIFQILVGVGNVRILNKSRIIELMTANRQNEKPLHKSRWMPMICIIYGIMLLWMLEVGAVKYHFYFDPRHPLPVKLMYWGNVLFPALTLLWAIAGAVLHRKIGFSRYLCGLLAGAVLTAIPIFSIAELEKAYFLGFDAPTLNQYLLFGVADILFIISAVMYLSNAALLYWKESKVSRKYHNTSLFLFGQLSSKLATNTKTMTIICVTLTFSICLFVIAPVLTGWSLGYLDSRAVYDIQISSRYNDVYEVENLPDTDYGEITAFIEQNNIAIKDDLTFSEYLPQKSDFYQRVKYDFPPLAIALKDYNAVRKMLGYEPIILQTDEFATHWHRAAEEKDIENYIAEHTLLETDAGTLKLSENAVFQEPVGESIYNLYTDVVYIIPDEIAQVLLPVQSNRFVMTQYPLPFKTAEMLEQLLGRSYPEDPDKDNLAGYSTTVHTTEVNRIIALNFILKASLIYGAIVLMVMCLTVLALQQLLDAEKNNYRFSVLRKMGVEEKDLHTLVLKQLGVWFGMPITAAIVVAIIVIGYFLQSVSAEISAYIGCGALMRQIGIIVGIFALLLSCYFLSTWLLFQRSIRNNSNSGRMKEILKLDHIQKYYGNSGNITKAIQDISFSVQEGEFVGIMGASGSGKTTLLNCISTIDTVSAGHIYLDGTDVTEINEKQIARFRRENLGFVFQDFNLLDTLTISENIALALTINKVPAGEIDGRVREMAGKLNITDILDKYPYQVSGGQKQRCACARAIINQPKLILADEPTGALDSHSSQMLLSTIQSINEDLGATILMVTHDAFSASYANRILFMRDGAIFTEIRKGGDSRRTFFEKILDVLTMMGGGMSDVRMNSRRYWKNRLPFLLTNLVCMAALTVFLLVCGNSFSAVVLILIVWALILLTGLALTYWKRKRQMKKLLDMAEQLSERYLISEVMELPEQAEDQVYYRLLKMAGKSMLEQIGEIERERLEYKEYIEQWIHEIKTPITAMKLLCENHRTDWTKELLLELEKTNRFTEQALYYARSEHTEKDYSVREMALSQVVHQAIADNKYLLLQSGMRLEVEEMQDTVYSDEKWVRFILNQLIANAVKYRTEQPVLRISTHKRQDQVVLVVEDNGIGIAASDLPRIFEKGFTGQNGRLIQQSTGLGLYLCKRLCEKLGIGITAESSEHGTAVSLSFHINCLIHEVQNMKLSKIMIIEDDPVIQGELQTLLNGNGYTTLGVRNFSAVTEQIQDEKPHLILLDIKLPGENGFALCSKIRTFSEVPIIFVTSCNTDMDELNSIMLGGDAFITKPYNTAILLAKIASLLKKAYPAQQQEQIAYGDAVLHLESSSLDYHGQSVELTKNELKILYYLFKNGGKICSRGDMIEYLWDNQLYVDDNALSVNINRIREKLAGIGLTDFIKTKHRQGYTIMDYMTLKEAAEKWGVTPRRVNYYCAGGRIPGAVKMAGVWLIPKTAEKPVDGRTKQGKVQKAMAKVEDCPGFETFGADVKAAREAKRLARKTLAEMVGIEWRYLANIENQGAIPSLPVMIQLIKVCGLPVERYFSPEIMREESEQRQRVSHKLKLCPEEYLPIIEGAIDGALKMEQTAKQKEDAMLTFEKVLEVFQAYLDDDPLYEVVQTSHGYTLMAWEPHRNDWYSAEIQKTPEDLRNALLDTYTNFLEDKITGNDRDLTVTENGEIQQRCRELWEKCRETMSKLTYIRCGDYDIPNLKLSEQPETSIGKYGRMRRSYLKEHRPILYNQLLMSEKLYPHLLEIDRTAQERVDTMLPHMMEAAGVTEELKACDPMRWVGLMSTLTAQIEEILIRELICSMRNEKITPLYERLSRDDELQGESNSISNQKQMLEDFARRNGLPNPTHFTDDGISGTRFDRPGFLAMMEEVEAGRVEAIVIKDMSRLGRDYLKVGQVMEVLRQRGVRLIAINDGVDSLKGDDDFTPFRNIMNEFYARDTSRKIRSVFKSKGMSGKHLTGTVIYGYLWDEKREHWLVDEEAAEVVRRIFSLTLEGYGPYQIACKLSADRIEIPVVHLARFNEGVNRSKPVKDPYGWGSSTIVNILKKREYLGHTINFKTRKHFKDKKSHYVSEDEWTIFENTHEAIIDQQTFDLVQKIRSNVRRYPNGWGEAAPLTGLLYCADCGGKMYVHRTNNGKRISQYTCSNYTKIPCGTLCPTQHRINESAVLKLVSDTLRAIAEYSRNDRTEFIHTVQETQVAQQSADISKKRRRLAAAQKRAGELEKLICKIYEDNALGKLPDARYRALDAQYAKEQDTLEIEIMELEKAVTGYEQSQKSAEKFIALIDKYENFDALTNTMLNEFVEKILVHERARKGSQDTTQEIEIYFNFLGRYIPPSLQPVPLTSEEQEELQKKEERKDRLHQNYLKRKASGAQKQYEDKIKAKKKAEMDAKKALIRAEDMKKGVFSTIGQLPKEEPRKGSIAASAAVMAPKFFDNIVLTKTERLMMSNRPPDPKNARNKNVLVVGGSGSGKTRFWLKPNLLQCHSSYVVTDPKGTIVLECGQAMLKNGYKVKILNTINFKKSMHYNPFAYVHSEKDILKLVTTLMTNTKGEGSGGDPFWEKSERLLLTALIAYLHYEAPVEEQNFATLLEMLNTMQVLEDDEEYQNPVDLLFEELAKKKPNSFTGRQYKLYKLAAGDICSKMYYTQEQIDCANQADLVSFLQGQGEQLTRAGQEYRWKRHDSLTIRGNKWYRHSQSKGGAPIDFVMEFFGKSFTEAIELLTGEKGAAQPPDRPSPASFSDFRLPPRNPDNRIARNYLTAARRIDEDVSGFFFASGDIYEDAAHHNAVFVGRDEDGIPRYAHSKGTAGNFRLDVKGSDKAFNFCYRGEGERLFVFEAPIDLLSFLCLFKKDWQKQSYLALGGVGEKALLRFLSDRPNIKTVYICLDNDNAGNDACSRLAELVPEGLTVHRLVPLYKDWNEVLQHRAEITDGKYLREAIYGLKEPTQEETVEIIRMSEVDTQTVEWLWEPYIPFGKVTIVQGNPGEGKTTFALRLAAACTTGGTLPGMKPLPPFQVIYQTAEDGLGDTVKPRLIEAAADLDRVLVIDEAKRELTLSDERIEKAITQNGARLIILDPIQAYMGEKTDMNRANEVRPMFRRLADVAERTGCAVILIGHLNKAAGGQSAYRGLGSIDFRAAARSVLLIGRVKREPNVRVIVHDKSSLAPEGKPVAFCLDPETGFSWIGEYDITADELLSGAGGNTATKTEQAERLILDLLADGKELASEDIVKAATEAGISERTVQNAKRNMGGILGARRVGGQWYNFIKKKQPPEPASMKRQLQGIALILVSILLMLGYGDVAFFDLSFKWDLIFSVIGITGVIMTFLPDKKMRRFAAIPAHPQKQYTRRWRLYHFCGFYYPIREVIPIAIYHWNIGIVSRGKGKSAVAAAAYRSGEKLTNEWDGMTHDYTRKGGVVHTEIMLPPHAPPSFSDRSTLWNSVELYEKAGNAQLAREIDAALPIELSREEQIRLVREYCSSQFVSRGMCVDYAIHDTDSGNPHCHIMLTMRPLDERGAWAAKSKKEYDIDENGERIRLPSGRYKTHKVDLTGWNDKDNTLLWRKAWADFTNDFLERNGSPERIDHRSNAERGIDEIPTVHMGVAACQMEKKGIATEKGELNRNIQKANRLIREIRAQIGKLKEWIADLFKARETAPEQPPQSPNLANLLMKYLSVQREKSRKYSQSWQHQHAADELKTIAAAVNYLSEHGISNLDELDDSLSSVSDKAYSIREGMKTAEQRMKELQKLLEHGRNYQTYKPIQDEYRQIRWKGKQEKFAEARRAELTLWDAANRYLHANLPKGTKTLPIAEWEQEYADLKTQRDSDYTKLKDTRAEVAELQKIRRCVDIALRADQPEQTQSRTKRQEQERMTKPREKTREELTAEIEDGKKKIRQFENREKMLRQKLSKEXXXXGAVFESIVPEAKNMTDEEAAALLRLALTSEPAREYLKKRAEGATSMRKKRLMIAIACIILVGIAVIVFFSQQGKKPYKDLDAAQIVSAKVLLTPPDKTIEIENIQELVEYLNDVVVYNEDNSYTEYDGQGVVFTLTMVDGTQTDIMAYNPFIVIDGIGYKTKYEPCEALNSYANELLNSGTANIILEEPPTLSVVSDETAIGAVLGTYSWQKTNIDGTAESTIADSPHPLECKDLLSPPFETTETTATLRFTEDPDTILSVQCWSDEHWGEPATNSEDVTIVGNVLTLKLGGYIYEVTAEWNTENGYGGTASYFIYLKTADMRTGLTKQEKTTDIWFDEKDPLIHIRTHNTDLKKRLAAYARQHPDQCRQTDADPETGCMEFEIAKGRFSFRLTAPYNEERREAARRSARENKATDRLKMAEQTPDSIITTQRNGQTIVAELFFNHSSTETFRDKLLKLVLADSSRLSASDGQEPEKTEILRMTDYSKITALYSRLSVGDEDRDGGESNSIQNQKIFLENYARGQHLTNIRHYIDDDESGRFFDRSAYSRMMDDVENGKIGVCIMKDLTRWGRDYLQVGNAMEIFRRNNVRFIAVNNGIDSEKPDTLEFAPFINIMSEWYAKDISKKVKTGIKTKGMSGKPIVTEAPYGYVKDPDNKDFWIIDEEAAEVVRLIFRLFIGGKNRNQIAVYLTQEQIPTPTFYMKDRGRGTCKNKTLNEDNRCKWNKATLTNILTRQEYCGDVVNFKTTKHFRDKHNHYVDRSQWHITENVHEPIISRSDFETVQRILGNAPVRRPNGDGEIHPLSGLLFCKDCGAKMHIRIDYRNGGKRHVAFCSEYHKGKAKNPKCHSPHIMDADLLMQTIAEVLKKIEDYSISNRAEFEALVKKNLAMQQTDQTKKQQKRIPQITTRLEQIDKVLNKLYEDNALGTIPQDRYEQMSQKYSEEYYTLKAELATLQEQLSAFENAGGRAQKFLKLTERHAAFTELTPAILNEFISRIEVHERDQKRARYAIQHISIYFNYIGKFENEVTQLAEPTEQEIRQMREEIEEAKKEKSRAYHRNYSREYRARNLEKQREYDRMKAREYRARRKAQAAAAQPTQMTTKKLTKLLALYLPYILLGLVATNFGEAWRLSEGKELGDKIMSMMGTIPMAFANPLPSLHPLDILVGLCCGAGLRLAVYLRGKNAKKYRHGMEYGSARWSAMQEEIEQKSFNIMISTTKLSARTVLRAVKAAFRLYQSKASQGKQSVRTLLRQNRGVSSVEISKTGIRGLERYAKKYGIDYAIRKDTSEVPPRYLVFFKAPDAEAFHSAFKEYSTSLLNKDKRPSVLARLQELVQAAAELSGKVRHKEQERGLMEQNENTLSVLKIAPGQHPQQVEIDNDLKALQQAVGGSIGASYPFEDPVAIVYNDDGKLMGLPLNRALRDENGEMYDAVAGTFLVVGLGEEDFASLTPEMAQKYEQLFHQPEAFLKLGNRLLVLPVPDEPPTEKPRTKPPAEHDRMLNFFIGFAFFEAGAIFGFFVAALLHAAHAGQESTIFEENDNGTEMNNTIDFKTAKTIDSMSKKLDHIDDAVTGFFSVMYMAMKHELGSVEPYFAATSPVLDLTVIRPDDAPHILACFDEADEGIGISENEPLGFRYNPKQVVKLMGQRYLVGPVIFHRFDEDGNFASLTMCDMYTIQKYLEAKSVTLMIDRDKLTCICIDNYFKSIVLKEPPKKDSVKIIRMSDVELTPVEWLWKPYLPFGKLSVLQGNPGEGKTYFAAAHPQDKENFCGMTIKGMVYDDKKAAGERLLLARQEMPNADMMLLGTYRGFELNIRFDSFKNEHQAVLRAELSYPVSLGDDARGNITRLDNAIDNFTDRIADAENALQNLEQQKQAAEVEVAKPFAQEEELAEKSARLAELNALLNINRDRSSSQDAPEEAEETEAPATRPSVLSALEEKANQPEPVKPFKSYLDKEGRMKKREHRLFIRVTDEERNCILDKMYGMGIHSLSAYIRKMALDGYCLNLDLPQLRRMAYLLQNCSNNLNQVAKRVNESGKIYSADLADLRTRLDELIDIGKQILSKLAELMMSMLKKVVLFPISLFVAFLALMAKWLLTLSSYVVAPLMLYIFGCGIYTACRQTWDQFLILLVSEFICFILFFGATAITEGIGRFSEWLAELMAATRLIALHKNKGKTVAACLKSRTDYVQNPDKTEQGELVSCHECSPLTVDEEFMLTKRQYELATGRRQKSDVIAYQIRQSFKPGEITAEEANKVGYELAMRFTKGKHAFVVATHTDRHHIHNHVIFNSTALDGSKKFRDFFFSALAVQRLSDLICLEHQLSVIEIKPYRERQKRTLYPPKESNRDRLCGIIDSILAEKPKDYEDFLQKLEQQGYEVKRGKYTSVKGARQKRFIRFKTLGAGYSEDELKAVIAGKAEHHPHQKQPPQEQPFQLLVNIQAKLSEGKSEGYARWAKKYNLKEMSKTLIFLQEHKIGSTDELNERAAAATEKYHQLGDSIKAAETRMAEIAVLKTHIVNYAKTHPVYDAYRKAGYSKKFLDTHREEITLHKVAKAAFDETGLKKLPKVKALNAEYSDLLTQKKAAYPDYRKAREEMQELVKAQKNIELFFTEEKDAQEKQQTRMCLTHENGKDDAEMEQLYLMPGEERYTKFRDENGVPKIRYTYCSLHGKLFNCVCRSTDEAQRLCEDWLVTQDRCYINMRSLHRNGADQKGFGISQQAFCNAKFAFVRTNALLAGTMSSMKQKMSYCPVAGIDVSKRFSDMCILSPDNKIFAQEKIYHDETSINRANALLQKAERLFFSKPVIVMESTSHYHLILFQFFSEHGYDVIVVNPLQSNSMKDFSIRKRKTDRVDAFKLAMMYRTKTLRPSQIPQTATRALRQLCRHRAELLNDVSSYKNRLTALLDQTFPGYDKVFSDVGGVTSCAVLVRFPTPTILLVEEESELVEVIAAASKSGYSFAKKKAGLLISAAQKAQTLGIHSCADETLIVCTIQMLRTLSESVLQIETAIDNLLAQIKEMRNNVSLLQSIPGIGSHSAALLLGEIGDISLFKKPKQLAAYFGLDPTERQSGSFRGTKNKLSKRGSSYARAALHMGIVNSICKRGKDSAANPVLLSYYEKKCKNKPAKVAQAASMHKLVFIIFAVLRDQKPFELKTPEQHAVEQGFVKAAMLCDTNVRQHFYLPITQPASIERCNGDGGEQFARTSVQLKQCFVLSAHLHCSLGLGICIAHWLMGIGGTGINILDRVGGGDAFASGLIYAMLHDYKAMDMINFAVASSAIKHTIHGDANITDEVSSIRNLMNMNYDIKRMKQEIIRKLSAAVAMSLVVGVSLAACGGSSSSTAAGVTKTGSADGFGGAVTATLTVDANGTVTDCKLEGAQETESIGGAALEELSKQVVAANGPAIDGVAGATVTTKAVRKAVAAALGVELAEEAPADSAAAAPAEPAAIVPVEGGIQIGQAYAAAHGTKCFTEAVAVVKDDVILAAYLDDFQFTSADAGVTAVPNSDSDFAAGYAEGKVLMSKRANADYYSKMMAEKGGSTVALDANFDAIQNFAVGKTISELEDVAAKGAEAVDAVSGATLVDTAGYLSAIVDAAKNAQTTQVSQLISEAFKYSHIVLASVTYNLGIYPAMHDFLMDMKALNLQNRTFAIIENGSWAVKSGDLMQKFVNNELKNMTVLNERLSLASSMGTDKRTELEALADAILESMKNLQNRTFAIIENGSWAVKSGDLMQKFVNNELKNMTVLNERLSLASSMGTDKRTELEALADAILESMKCGTLMGGESGTSHMGNTYYYYKCGNAKRHGKAHCDLKAIRKEPLERFVVDTAIKVIFSDEIIEQLIDLVMEAQQKENTRLPVLKDQLRDTEKRLANLLEAIEQGILTPTTKQRLDELEARKEALNTSILEEELKKPVLTREWIRFWLEKFRKGDVGSTEHQRQIMKKKATIVSVIIGILAVAAIIVFSAYRSSESYRKAKAAIQWDCSVTCTEESTSAKYVITYSDVKVLSKTGTLTIQNKNDFDIVVHLLCEGEQEVVSDNIPANSFYSFTNVTDKEYTVGIHADVGVAADIRVVVYDGKDTEPYTKMNKKKKSTNTSPYPDEVIDRLARAFYPAILACWNSEEGQREFAAWQAEQVHHTPSKEKQSVPDCWVSVKQFSKNDTATACQDWLRSTRLGRGSIKSHVRTVKVLGMGLFAFQERIHLWKGVTHMINLKIDPEFQSQIPPLTDDEFKQLEENILKEGKLLSPLIVWNNTLVDGHNRYEIVQEHPEISFSTMPLPFESREEVLAWICKNQLGRRNLTPEQKKFLMGKQYSSEKRTEAFRGNQHTAKKSGSVQSEHNQKSMKTCERIAQENHSSASSVRRAEYYAHGVDVADELSPGFRDRFFREELHIPDYLLENLGKAKPEEQAEIFKEIKNYVPKPKKVKPNKVTVKQAEKAASNTIDENYDVPQKFLELYYRLHNAESLMRKSWEVTFDLNPKLLTHPEQVKVLRFALKPHLEFLKTLDEVLAESSGESSKTAMKTHQYIISFDPRDVADNGLTMEMAQALGLKFCEENFPGHPAIVCTHPDGHNHSGNIHVHIVIGSVRTREVERKPFMQKPRDWREGMKHSSTAQTMRHLRVEVMELCEGAGLYQIDLLNGSKERVSEAEYWARRRGQQKLNLANAALTAAGQPPQQKKFETVKDTLRKQISSVLYRAVSLEDFSDRLMQQYGIAVKESRGQLSYLPSGRTKFIRAKHLGDKFDKAAVLATLQANTERKPKVQFKQDAIGKLIDIQSRLTEGKGIGYKRWITKHNLKVIAQTVKLLQEKGLTDEDALNQRIAELETKYHDSLAVVKDLEGRMKANNELRYHIAAYTSTKNVAQQLKTAKRPAAFEEQHRAELTAYRAAAAYFKANNITKLPSPKKLEAEYAQLASEKAKFYEQYKEAKEELLKXXXXKAECCVLFPGGRTGAAGEIKECAYDQSENMGLHVRRLFVKQYSTNDTATGCQDWLLFTPLGLKSIKSHDHTAEVLAMGLFVSGSGTPLSRCNTHDFVPKSCAKGDYAPLKFPSSMKKIHKFFSKDLLHILGAVGIFVAFLISIAYKQVGIGALIAAWLIAMAIIGVAWITDIRKADLLKNGKIVSGKVNAVKRVHIKFHMSTYHLADEDVIYPWVIRYQYKVGKDTYYGQSHWFWFNPLVSKGTPIKVTIDPQNPERSIVAAWESMAEKNTADIGFEKQIWNAACVLRGNMDASEYKGVVLGLIFLKYISDRFEDKYNQLVADGDGFEEDRDEYTSEGIFFVPAGARWSDVSAKAHDPEIGQVIDDAMRAIEKENARLKDILPKNFARPELDKRRLGEVVDLFTNIKMIEHGSEKDILGRTYEYCLSMFAEQEGKRGGEFFTPSCVVRTLVEVLQPFKGRVYDPCCGSGGMFVQSAKFVENHSGNINDISIYGQDSNPTTWKLAQMNLAIRGIEPDLGKYAADTFLDDQHPTMRADYIMANPPFNLSNWGAEQLKDDVRWQYGMPPASNANFAWLQHMIYHLAPGGRMGMVLANGSLSSQSGGEGDIRKNIVNADLVDCIIAMPTQLFYTTQIPVSLWFISKRKKQPGKTLFIDARKMGVMVSRKLRELTDGTKEEYKNEDGTLKNDIKKIADTYNAYVAGTLENVKGFCAAATTEEIAKQDYILTPGRYVGIEEQQDDGEPFEEKMARLTSELSDLFVQSHKLEAEIKEKLGAIGYEIMKSEWRTVALGSVADLTVGFVGTMASNYTETGIPFLRSTNIEPFDIKLDDIKYISSNFNESLRKSELHPNDVVIVRTGTPGACAVIPAGVKAWNCSDLVIVRPHRNKLNPLFLASYVNLASGVINTQLVGAVQQHYNVGAAKKMQIPLPPIGEQDKIASIIGMLNKKITINSKINDNLEQQAATLFSSLYNRSNTEVRYTDLIQILGGGTPKTGETAYWNGNIAFFTPKDVGTPYTFITEKTITEEGLSHCNSRLYPVNTVFVTARGTVGKVGLSGVPMAMNQSCYALVGKETHQLLVYFYTLKAVDRLKHKASGAVFDAITTRDFDSEQIMKLSDDNAKAFLYVAEPMFQEILNNSIENLQLSTLRDFLLPKLMSGEIDVSSVQLMKNQIINEIQRKMLPYLNNEQLLQLKMVLETSFQGLIFDKGEELPKAEKQNAVKVFITAKRIEGCSEKTLTYYSKTIEAMLNGVGKLPQQITTDDLRKYLTDYQTQRRSSKVTIDNIRRILSSFFSWLEDEDFIVKSPVRRIHKVKTAKIIKETYTDEALELMRDHCSTVRDLAIIDLLASSGMRVGEMVTLNREDINFNERECVVFGKGNKERLAYFDARTKIHLQNYLDERNDSNPALFVTLKEPHERLMIGGVETMLRELGRRLKLNKVHPHKFRRTLATSAIDKGMPIEQVQQLLGHQKIDTTMHYAMVKQQNVKLAHRKYIGMAKLGDFMRIKHGFAFKGDYITAEDNEIVLVTPGNFEIGGGFKEKKCKFFSGDYPKDYVLHADDLIVTMTDLSKQGDTLGYSARVPNSNRIYLHNQRIGLVDVFNPNADKDYLYWFMRTPQYQKKIVATASGSTVKHTSPSRICDVEINLPSIDKQKKIASLLTSIEKKIHISERINDNLAAMRIQKQAFKRKSLPYFTIKPLLYAIEQTQVATTVIHIGKKDFDAFEITLPDPRVLDSFDAITTPMVEKIVENRFEIKQLELLRDALLPKLMSGELDVSNIQLMKDTYESFFIPTLEDNESVYHYTSAEALMGICKKEFWVTESHFLNDSTEFQLGTEIVLDVLKDAIKDEGLAEVLEKLVPPKVKDSDVMLHIANEYTYAGYYVISFCLDNDSALMWSQYSNYVGYCMKFNFRELVTSFDAKYIYHGKVLYTREEQYACVEKMIDIALDERSDILKIPSKNDEGKIEKKQLIEFIDRIVYICLYYNMFFKNECFSGENEYRIIFPAVHDNKEVALEDHTKQNFRVKNEILIPYIKETMKNLDSLKAVLIEPKNNSDIAEKGLKCFFRNQKMNIEIQKSKIPLRYMFAFTEDTFEQAVIELFENMGYTHIYAPDMNRTDYSRPLLDDVLRDCLVRLNRSLPAVAIDEAILKLNDFDAGSLLQKNSIFMDYLQNGITVKYAVKGEERSSVVKLIDYADADKNDFYVVNQYTFVENGNNRRPDIILFINGLPLVLMELKSPSKDEVGAENAYNQIRNYMKDIPSMFYYNAICVISDLSSNKAGTITSGLDRFMEWKTKDGDYENTAYAQFDTFYEGMFQKARLLDILKYFILFSGDGQKPIKILAGYHQYFAVRKAIEKAKIATKTDGKGGVFWHTQGSGKSLSMVFYARLLQDALDSPTIVVMTDRIDLDDQLYTQFAKCAPFLRQTPVQATSKENLSKLLDGRKANGIIFTTMFKFERGEKPLSERRNIVVMADEAHRGQYGFDEKIVIKENEQGEKEAHTVIGNARIIHDALPNATYIGFTGTPISAKDRNTREVFGDYIDVYDMTQAVEDGATRPVYYESRVIKLHLDQNTLALIDATYDALEQQSDAATIEKSKKMLGQMESVLGADSTIQSLCEDIVTHYEKYRANLLTGKAMIVAYSRPIAMKIYRKLLELRPTWNEKIGVVMTGGNNDPEDWKEIIGTKSHKEELARKFKDNDDPMKIAIVVDMWLTGFDVPSLATMYVYKPMHGYNLMQAIARVNRVFKDKEGGLIVDYVGIASALKAAMKEYTKRDQSRYGDMDIAKVAYPKFQEKLQVCKDLLHGFDFSGFIGGSPLIMAKLVTGGVNFVLDAKAPKRKDLFLREALLLKQSHSLCSSMTTEQERHEAAYMEAVRSTVVKITYGGSGGKTLSLKEINAQINELLKASIQSQGVISLFDSKKADENISLFDPAVLDEISKMKEKNIAVEILKKLMAEQVSLYKRTNVVQSQKFSEKITQLMNSYYNGLITNEEVIKELLKTAQEITELYNNGKKLGLTQEELAFYDALTKPENIKDFYQNNELIDLTRELTEMLRKNRTIDWQKKETARASMRKMVKHLLKKYKYPPEDYDTAISTVISQCEMWTDNMMAMKFCNFLLRVDGIREASLEDMKDVVAKGNHIFRPQKQKYLYSVDMDIIEERFFWMASDYDDAVRFRDYVINKKTGEKMPNPRSKEQVEPRQQFFACYDAQKHFLYMNDYNKKGFVEQYLSDTLQKEFKISNIYTSLDDFCKNIKTIRGFQYTQVDNVFSRGGTLFSQVGNIWGQDLPSKLQLKISYGDLPIHGGGKGLVDRICRHREEFEDVVIIGCDESGIEQTFDFSSVLKHFLIQPTKDENEHFEPDEVRELLLAKLRMVKMILDDLRKRLERLDEDADLMIDNNDRYQMVIVGGSAFILLGKLTRATHDIDALSVPKELYGLLGKYDINTDVEAYIDNFPYNFQDRLQPLPFGGTKVQFYTPSLEDLVIAKLCSFRDTDKADVESEDVRNSLDWDLLERLATDEDELKASILNDWRYRDFYIRYQEYVERWRPCESMTFEGFLKQYVAELAGVQTASVHKLADCLNENPRLKEPLFLYALAVDKVDLLLRYTVTSAVSAEYEQLSNLYSRAQMLLLLEKQSPELPEGYLKVWRSYCSVRDAVLADNDTKELIHRRVLELQQKKKLTNYRLYTDLKLNPGNVNAWLKHNDSSKMSLDCARQIYKYAKSYPSVRMTAVIYARYSSDNQREESIEGQIRECTAYAEKNGITVIKHYIDRAFSAKTDNRPEFQQMIKDSGKKLFDVVLVWKFDRFARNRFDSANYKMILKKNGVHLISVMEPIAEGSQGILVETLLEGMAEYYSAELSEKVIRGQTENALKGKCTGGTGTIGYKIDEEKFYHLDPLTAPLVLEAFQRYDNGDKMVEIVNFLNDKGVRNMLGGKMTHSSVNTMLKNRRYIGELSFRDIVVPDAIPVIVPKDLFDRVQKRLDKNKRAPACGKADEEYLLTTKLFCGKCGALMFGESGTSATGRTYYYYKCANVKRRKGCNKKTVQKDWLEDLVVRETMKLIQDDAVIDKIVQLVMDVQNQENTTIPLLEKQLREVNKKLDNLMKAIEDGLYTRTTKERLEALEIQKDELTAKIADEKLKKPSFNEDFIRFWLMKFRKFDISQKKQRKALIEIFVNAIFLYDDRMLITFNYKDGTQTVRFEDALTADGVEGKSSDLSSSAGPMQALGVDIQTIQSIVGHADTEMTEHDLHVQESIRQSAIQLFSEAFSAMRCWNCRRPSGYREQVLKAIGGLAIALANDGKLEEAQQELDTLQKKGASSGDCDLVAAEILSLQKNYDQALALYIKVFNEVEDPQLLSHAYLSAANAALNQDDMEKAVRILKQGCQNLPEGQAVLQKEMLADLMMQQTASDKENAEEYYAEAQQLLEELVDSGYDTIATRLNLATVLQALDQYSEAEKVLKDLQEQYPSDYRFDMQLAYLLIDQLRTSGWLKMVGIVGMIVSTVAAVVSAWILRRQEKKLKEQIWNEYQMLKKLSVTAVILAMSAMLLVPTAYAVQSVDAPAQVALMTIDGKLYHVSKNGYAIDRYAKGLHEIDGGMYYVKEDGSFLTNSAVEYLTFDANGRYTSGNATLDSYVDQALAACTNSGMTKAQKLRAAYLYVRDHGAYLARPHQARGTTAWAEESALFMFEHKKGNCYCFAGQFLYMARRLGYNAYVVSGGVGRKDSDHAWVMICENGVPYIYDAELEWGYRAGRYGHAEYNMYKMPLNKTVFSYQFPMVLKHLYTLLVVLVGFVIFRADNMGQAFSMIGAMFSGVSASAQTGLLLAQCLTPLTLFALAVGLVGSTPVLPLVCRKAEQQTGSVYACLQALSYAGALALLLVDILHLSAASYVPFIYFQFMQVKKLGYILFVGVIATICILPVAVMPWQTEKAVGNEQLASFPELRKEDGSFNTGILNEFSDYFADHFGLRHEMITLNDQLTGTVLKTLDSSSVLLGKDDWLFYKSTLADYTGAEPFTARQSYAAAHVLGLMQEYCEENGIGFCFTIAPNKNSLYSGQMPARYTAASVRNAQLLQQQMEQQNVRYVDLFKTLSDHEEQLYYRRDSHWNMRGAQLAAQTLLKELKGSEAEFDSCINGKTSPHTGDLYEMVYPAGNETEQDTAYDFTYQYDEKFHSADDITIHTENSAADGSIFVYRDSFGINLHPFLAQSYGNACFSRNMPYLLTAVTEEQPDVLLVELVERNLNWLLERAPEMPAPERMAVPAADTGTSAKAQRKDSRMEGTFCLTGDLSGQRVDDDSPIYILAETETYEASPCGEGTQPFTAYLPQNVREQQLKAAFLSDGEWVFCALADMNVNYKMMGVVLCGAMLLASGCGAKAETTASSAVESESVSVVALEAASSEAVPESEAVSEAVSEASSAVSEAASEKPAESKAESKAESKAETAAKSKPAKQETAASSKEEKTEPVESKPVTETAPAETASLETALKYVGKDVSKLYAAIGKPNSSEYAFSCIGDGEDGLLHYNGFTVTTYRENGKETVQDAYMKRQKIKRYRFSVTQNTRRRRAATPLKAVGVVLVCLCLLTGAVFGIYKAIQSKTTGWHGEGLHRYYISPTTGTRAQGLYEINYKLYYFGSNNFLKVGWIEENGYVGYANADGELTQGEAKIDGKYYYFQPETGQLYTGWIMLDGVQYCFDETGHPRTGTYQEDGKVWELDSDGRVKNRLNGWKKTDGVLKYYNNSGAPAQGWTEIDGKDYFFVDGVSQAGWVETDAGTRYLDGNGNQMTGWCVIDGQPYAFGTNGELKQGWDHSHEKSYYFINGVSQSGTFGEGALSSNLNGSGSVQPVGNQAPEDDLAEDAEGEPPEEELLEAQPTQTETTEAGQTAPAAQQPTQSPEGSAAEQETALKAPTAPETPAQEQQEEGTENTMKTTRRDFLCLSAMACAWLLTGCQNPTVEERAVSWQQQEVSDPVSETGPMWNAALDDNAVLRDGIRVPQNFELPLEGSTGFAGAAVMLLYERPDGTSTVLRRLAAGDMFYIRQESGAYWQVCLLDGTVGWLENELCMINLPDVLPSIVYENPNAKASIFKTCGKDIEGITGQKLYDGLFYNQRLGRDEYLMPINYAMAKKVGAAQKDALKAGDCLKIVETFRPYEVQMLVKDAVYAKARTDKELMTALNKGAWNIGWFIATSLSNHQRGVAMDTTLLRITEQTEHSMAGCPFVQVTGEEYAMPSAMHELSSAAACFTGPVTSNSATAWKRATASASMTDGARRLQGYCTNAGMTPLASEWWHFNDLDAQNKVRMTSGNGKFWLDGCVSWKMFEAMNTTLRRDADEIICSSIQAVLPDKAVCRALEDFQPGGGRVLLVAAGKAAWQMAHAAVQALGRVDGGVVVTKYGHVKGEIPGISCYEAGHPVPDDNSFAATEKALALVQGLTAEDTVLFLLSGGGSALFEKPLVSGGELQDITNQLLASGADIVEMNTIRKRLSAVKGGRFAQHCAPARVFSIVLSDILGDPLDMIASGPAVPDSSTCAQALAIAEKYHLDLSEQAKALLAQETPKALDNVTTQITGSVRELCTAAAKACRELGYEPILLTDRLCCEAREAGSFLGAIARTHAGQGKKLAFIAGGETVVHLTGKGLGGRNQELALAAAPALAGQNAAVFSVGSDGTDGPTDAAGGYVDGDTAAALAAAGWNVFDTLQNNDAYHALQAVDGLIITGATGTNVNDVAVVLIGGEVQADAMFLSDIKIISFCRRTVKYFQQKNPPARVKRAKRGQMLMEEKILNTRKNGMAALLLTLLGYVVAIALFIYSITLLNADRMLLGVPLLILSIAYWIAGIFLFCGLKVLKPQEALVLTLFGDYIGTLKGQGFYWVNPFCTAVNPAAGTRLSQSGDVNSKENSVAALFGNNGQNAQMSVESMSKKISLKMMTLNNSRQKINDCLGNPVEIGIAVIWRVTDTAKAVFNVDNYKEYLSLQCDSALRNVVRVYPYDVSPNVDTTGDGVADEGSLRGSSEVVAARIRDEIQKNVAEAGIEVVEARITYLAYAPEIAAVMLQRQQASAIIDARKMIVDGAVGMVEMALDRLNENKVVELDDERKAAMVSNLLVVLCGNRDAQPIVNSGSLYMAEPKKQVPLRLNAKLYDALAAWAEDDFRSVNGQIEYLLTECVRQRKKNGKYVSDQLDVPPELDLHMERAAEHAKRKLFTRPLHKTGAVALCLSGKSRAFRREAGTNERMLRYFVEKGDRSCGNDLKRQEKMDRYLGENVSFLGFSGKKLAMKILVVDDGQLAINSLIRILCRVAPDCDYISAMTTDDALTWMRQGPMDAAFLNLEMPGMNGLALARMIQKLQPRCNIIVVTEHPEYALEALQIFVSGFLLKPANEADVRNVLENLRYPPETAPVGIKIQCFGNFEIFVGGRPLSFKRSKSKELLAYLVDRNGATCTNGEMLAVLWEDKPDTASLHSHLRNLIFDLSHTLEDAGVNGLLVRGRSTLALDTSKVDCDYYNFLRGDRSAFNSYRGEYMTQYSWAEVTRSALRQQAAAMPKSGSIPSYYVPPTGFMNVWYINSILGAICLEEENDALCGVHFCPDGAPELEPLPRRVVETPLLQEAEEQLNEYFAGVRREFDLPLAAKGTAFQQAVWAQLRKIPYGEVRTYGQLAAALGKPKASRAVGSACHRNPLCIVVPCHRVIGADGSLTGYAEGLEIKEYLLELERFMVKALEDIIAKSSSIVFFGGAGVSTESGIPDFRSVDGLYHQKYDYPPETILSHTFWEENPEEFYRFYRDKLIVKGAKPNAAHLRLAKLEQQGKLRAVVTQNIDGLHQAAGSKTVYELHGSTLRNYCTRCGKFYDVDFIANSTGVPRCTECGGIVKPDVVLYEEGLDEEVLSGAVDAIRHADTLIIGGTSLVVYPAAGLIRYFRGDNLVVINMQPTGADASADLCIAKPIGQVLSEDVSLDMIQVCDPPRQRQVRRLSAEEFFTLVRCGGAGFYRPCSEVLRMLTAGEAWGTAGAALLVLPLTADTAAAAALRNWLGRRQLEGGCLLTPPVNTGEELPARLVEIAAARADRLRRKGTAWAVVECTETAAALLPLYFRQGFGLRALRPLESLAPCFLLRTGCVPARTAPVWVPLEDRVQLALLLAKGYAALDSRPYGGSLALALYPLKETEMKAVILESYVMEEGDLDWSGVKALVPDTTSYVRTDYADIAPRIGDAELVLINKCRIDEAILAQCPNLKWVGIIATGTDNIDLEACRRHGVAVANVPGYSTYSVAQMTFSLLLAICQCAQRYDRAVKAGYWQLGIPAEYGLLPQVELLGKTFGIYGYGSIGRQTARIARAFGMEVLVCTRTVRPEYAADGVEFVDFDTLLARSDVLSLHCPATPETRGLVSREALAKMKPGAILLNTARGALVDEEAVADALESGKLAFYGADAFATEPLPPQSRLRSLPGAVLTPHIAWTTKEALQRLMDITTGNLRSFLAGKGENIVNPMSYAIVFSSKTGNTALLAQTLQEQLPQADCCYFGAPDAAALAADTLYVGFWTDKGKADADTLDFLQQLHGKRVFLFGTAGFGGSAPYFEKILAATRKALDGSNTVIGSFMCQGKMPVSVRQRYEAMKAKPLHIPNLDALIENFDKALSHPDAADLEQLKQAVKMARLLIYDAYENKVYTYANLNENDPMPYSTLTTLRLREFRGKSASPTLWTTIAAMEAWNLTRRKYGRGIPVGYAFRRIWEGGHGTRSQHYAGVAFDVGQSLDQRQRTAIYNAARASGAWGYVEPLSQTPTWVHFDRRYGTPACSGTTAGYPTLRRGSRGCYVMILQDALSTLGYQTGTRIDGIFGARTEQALRGYQKRTSLRVDGVCGCDSWKKISTAVIGIGRTKTTIDMKNTGTLRIQTFAARQSAPVEGVTVAVQGDGFTLHCITDATGSAADIPVEAPACTLSLDEDNTTRPYAIVSLTAAKPGYRTVRIEGIQIFAGQVTLAQPQMLPVTEEDRDIPDAPIVIPPHALFAGSGGSGPQPRENCTPRVLEQVIIPKNITVHLGKPAASARNVTVSFRDYIANVASSEVYPTWPEQALRANIHCQISLALNRIYTEWYPSKGYTFNITNSTSYDQYYVHGRTVFEVMVRITDDIFNTYLRKRGTVNPYYSEYCDGKSVTCPGLKQWGTVTLANNGRSALQILRYYYGSSIEIVRTKNIRSIPQSYPGTPLRQGSRGAAVFTLQRQLNRITKDYPFLGKLTVDGVFGSRMAATVRAFQKQFNLTADGVVGRQTWYKISYIYVSVKDLAELTSEGETSTGTLSNGTWNGTVLSTGASGSAVEQVQFWLNTLAQYDSAIPSVKVDGVFGTATANAVRAFQRKYGLTVDGIVGQTTWKELYDEFLSIQSDNGTPNAYPGTPLREGASGQNVRLVQFWLKIARTVYTSLESVTVDGKFGAGTAAAVRRFQRYFGLTADGVVGRTTWQKLYEVYNDIANRLLSSSLRPGEYPGVLRSGSTGTPVRELQFYLYLMSAYESSIPPVSIDGKFGADTEQAVRAYQRFAGLTVDGVVGRTTWNSLYGRASQLRSSGPVVTLKRLPYPGTPLTVGSSGETVLYYNLLLQRIAYYFSSVEVPPLADRYTDETATATRSAQQLLGLEQTGIADADTWTAVEALSLQLAAHAPNPDRDTPPGIAYPGRAIAEGSAGQEVGQVERWLNRRAQLSCGEGYVADNNRFGASDAAAVRAVQQQAGLQPVNGIVYRETWHALQAQCTDPCGCEKEEMKLNRVTALFLGLVLAFSLAACGQGASSASTASSAASTAAAESKTEEQLLAEENEILSANDALWEKVFSSMDKNVTETTLSTNYGDFLLSAVEKAKDQFSDEEYKTLTADAEKIRAIEEQIAALAPAEDAASGAAAQGTAFPQFEGSDLEGNPVDNSLFAGNAFTVVNFWFNGCKPCVEELDDLNALNEKVKAQGGEVIGINTETLDGNQQGIDAAKKLLAAKGASYRNIYFASGSEAGKFALNIMAFPTTYVFDRDGNVVGQPLLGGIDKEENLAALQKNIDAALAKDSAKMDKKKLNPLARFRGFIQAGATLLTNLHLPNFAKGTLYQGSGKYVCVPGLNCYSCPGAAGACPVGAFQAVIGSSKFRFSYYITGILILFGVLLGRFICGFLCPFGWFQELLHKIPSPKLSTKKLKPLRYLKYAVLLVMVVLLPLLAVNELGMGDPFFCKYLCPQGVLEGAIPLSLTNAGIRAALGKLFTWKACILLAVIVGSVVFYRPFCKWLCPLGAFYALLNKVSLFQMRVDTHKCVSCGACAKACKMDVDITKTPNHAECIRCGMCMKACPTDAIQYKFGLGDKSNTETTKEMFMTKKQAQLLLLAAGVLMLLFGVWRGEADTVFSKAIRLCMECVGIGMGDKISAKKILTRILTPSAIICYNEKNAIFMGRVENKMRLLVVEDEHSLREDIARKLRLSGYEVDACADGEAALEALAAERYDLVLLDLNLPKVDGMQVLRSLRRHDLETCVLILSARSEISDKVEGLDAGANDYLSKPFHLAELEARVRSLTRRKFIQQDVCLCCGRLSFNTRSRVATVDSQTLALTRKESGVLEYLLLHQGRPVSQEELIEHVWDGSVDSFSNSIRVHISALRKKLRAALGYDPIRNRIGEGYEIGGEAQMKHLSLQWRITLLTALLIACACVCMNLLLYRTGVTGMDALNGFMMQYQPGSADSLTIEIPQEEMSSLLAHFSQEVYDAKVVFGRKGWCITAVVTILSAAIAYFVSGRALKPLQQLAQQAQRVDQDSIATVRLDENTVQEFRQLSRSVNRMLDGLAQSFELQRQFAGNAAHELRTPLAILQTKLELFAEEHPAMDAETAGLVSSVREQLDRLTALVRTLLEMSNLQSVSRTDQIALAPLVEEILTDLTSLAQKNNISLQQDCAELGMVGSDALIYRLVFNLVENSIKYNRPGGAVRVTLRQEKQAAVLRVADTGPGIPADCRESIFQPFFRVDKSRSREMGGVGLGLALVREIAVLHGGSVTVESSSENGTTFAVTLPLAQPCMQATIHNEFLTLTVDTHGAEAVSLKNAAGEEMLWQADPAIWKRHAPILFPWTGKLVDGTFAAKGKTWKGGQHGFARDLEHTLLRAEGDTIQLELRADDAIKAERFPYDFVLTSTFRLEGKTVHHTLQVTNPGTEELRFGIGFHPAFNVPFDAKHTTTDYEFRFDRPESPVILDASPNGLLSGKSYYQWKNQQAIQLTDDLFANDSFCMAGLRTGTIGICEKDTGRNITCRVEGYPYSLIWSAPAKPVRFVCIEPWHSLPAAATDPQDWEQRAAAACLAPGESWQTTLSTTFDRMAKDNKKLVQAITSQEENFAQWYTDICVKAELVEYSSVKGFIILRPYGQAIWELIQKDLDARFKATGHENVAMPVLIPESLLQKEGELVNGFAPEVAWVTMGGSDKLEERLAVRPTSETMFCDHWSRVLHSYRELPMKYNQWCSVVRWEKTTRPFLRSREFWWQEGHTIHETAAEAEAETQQQLNCYADTCEQDLAIPVVKGRKTDKEKFAGAEATYTIEAMMKDGKALQSGTSHYFGDKFSKAYDVTFTGRDNQLHHPFQTSWGVSTRLVGAIIMTHGDDDGLILPPAIAPIQVVVVPIAAHKPGVSEKAAELAEKISKYARVKLDDSDNAPGWKFAQWEMKGVPLRLEIGPKDLEKNQCVLVRRDTREKVFVSLDELETAIPAQLEALRKDLYQRALENREKRTWAATTMDEVKELAKANTGYIKTMWCGDLACEMKMKEEAGLSSRCMPFEQEQLSDVCPCCGKPAKAMVYWGVAYMDTFEKIRALLAEQLDVDPAKITLESDIMSDFEADSLDIVDMVMTLEDEFGIEVPDDAIESLRTVGDVVNFVDSHAQNMRIVKPCFAATEENCLKAAFSLDISCRFFYHYKVMSLKGLTSPFYKERMKLSFTKMQGCANDYIYLDCRTSGVPEEIAALSERLSRRHFSIGADGIICICAPVTAGADAMMRIFNADGSEGKMCGNGIRCVAEWLYTHGVAKPKLAIDTLSGLKTVSRMGEGLWQVEMGTYTAMAAALPAVNMGEGPLVDLPLEVEENLWRVTCISVGNPHCVTIVPEVDSLKLEQIGPGFEHHENFPERINTEFVQVVDATHLKMRVWERGSGETWACGTGTCATVAALTELGICPAGEDVHVQLRGGELTIRVLPGKQLLMTGAAETVCEGTTEVMKMNKHYNELKASYLFVDIAHKVAAYQEAHPEKEIIRLGIGDVTQPLAKCVVQAMRDAAEEMGTKEGFHGYGPEQGYPFLKQAIQGYYASRGTQLAEDEIFISDGAKSDLANLLGLFDVDNTVLVPDPVYPTYVDDNVTDGRKIIYSRTGQENGFLGMPDESVKADIIYICSPNNPTGAAYTRAQLKAWVDYARKNDAIILYDAAYECFISEGELARSIFEIEGARQCAVEICSFSKIAGFTGTRCGYTVVPKELEREVMNINKLWLRRQTTKFNGVPYVVQRAAAAVFTESGMAEIQSNLDYYRRNAKVIADALDECGVWYCGGKNSPYIWLRCPGNMKSWEFFDWLLENCGVVGTPGVGFGECGEGYFRLTAFGDAEKTKLAAERIKTAIKALMELFINNKSGAPIYDQIYNQIKQQIISGALQPDEAMPSIRGLARDLRISVITTKRAYDELEKEGFLYAVPAKGFFVAPKNTELLREENLKKIEEHLTEAVRLSASCGLSREELREMLELLWEDMNALELRGLTKHYKDFTLGPLDLTLPGGTICGLIGENGAGKSTTIRLILDMVQRDGGTVTILGRDSRTASVRTKEEIGVVLGSEGIPLCLNAVQTGKVMAGIYRNWDAAAYAELCQKFGLPDKKQYKDYSTGMKMKLCIAVALAHHPKLLLLDEATNGLDPVVRDEVTDLLLDFARDENHSILISSHIVSDLEKLCDTIAFLHKGRLLLCEEKDALREEYALWHGTAAQLAALDTPVYGKRVTPYGAEALVRRDAMPAGAELAPVSIEELFVLMVKGENVQMKGLLLKDAYQMWSYTRWIILMSVAMMLMGTFFMKEGSNFFMLYSGLLLGMSPMTLLAYDQNGRFSAYSAALPVTKGQIVGGKYLIGLCGMVLAELLSMTALAAAQLLWGTVTVQLTVATLLQVAMLTLLGNIILLPLAYRLGYQKARYAYYLCIGLLASFMGYFVSSGDNALNSLLPAQGSLLVLVVVLAAALALYALSWRLSVAWYGKAEQMKKSQIAGILFGVAMGVLFSVSMGTVGFALGAGFVGLGMVMFEGLDDPPDKKMGISHEYHSAPRRRTRGGISGKLRLAGVIVAILLVAYAVTAILEKGTVEEDSTPQTGAGGIAQNILAPLPMQGEAASGSGSEGAADSSGTAQAVQLESFGPARQTDGAYTIKAYDASVIRQPACGQVDLSYFSDAAFLGDSLTVGFSDYQINLSGALICGYTGVGPDAIVNRAAVKSPTRGQEVALDVLAAAQPKKLYILLGTNTLTTLGASDRFLAYYGQMLDELRQTLGEDCIIYVQSIPPVRPAAAEKKPGLASDVLRGVNEQLAQLAASKGCVYLDLWEALADGEGNLKEMIAAPDGVHLSAGNGYGAWVTYLRNHAKYSASNPWIMGSAYSAEMCPLPGKRLSAPSSKVVCRPCTANGPGRQNSHLPQLTQKYLQLVYLLFVKCAKMAKNIIIGQSGGPTAVINSSLAGVYKAARSLGADKVYGMKYGIEGLLKEELLELNVLLDDRMSIELLKRTPSSYLGSCRFKLPDPDTDATPFVKLFTLFDKYDICAVFYIGGNDSMDTIAKLSRYGQQVGSNVRFIGVPKTIDNDLCLTDHTPGYGSAAKYIATILKEVIRDSSVYNIRSVTVAEIMGRHAGWLAGAACLAGGEDCEGPDLILLPEVPFDQDKFLARVDELQRVKSNVIIAASEGVKTADGTYLCDLVSTAGQLDAFGHKAILSGTSRYLSELIHDKLQCKSRAIEFSTLQRCASHLASRTDVNEAYAVGGAAAAAAFAGESGRMIALKRVSNYPYQCITESVDVQQVANLEKKVPLEWITPDGMQVTEAFEEYARPLILDEVTPVYVNGTPRHIRLMGKNAIVGQSGGPTSVINASLAGVFESCKNRGADIVYGMCNGVAGLLEERVVDLSTLLTDDLDIELLKRTPSSFLGSCRYKLPDWRDDEAVYKKLFAILEKLNIGYFFYIGGNDSMDTIGKLADYGQRVGSDIRFMGVPKTIDNDLMVTDHTPGYGSAAKYIGVVMKEIIRDATVYGTKYVTVVEIMGRNAGWLTAAAALAKSDDCEGVDMICLPEVPFNVERFVEKVRVMQEKKPSIVIAVSEGVKLEDGRYVCELADDVHAVDAFGHKALTGTARYLANVVARNLDTKTRCIELSTLQRCAGHLTSRTDITEAYQVGGAAAKAAFEGVTGQMVALKRISNNPYQCTTELHPISEVANLEKKVPLSWMNNNHTQMTEDFLDYARPLIQAELTPLYIAGLPHHIYMKNQKMKYDARACHFNMDTGCVELRLRDGRKISIDCTGVEDALDVTMAQQTELDYLIYNDPLGYADLILNGDPEEYLKNVAGSHGLEDMNKKKKSNKSGYPDEAIKTLARCFYPSMVEFFNSEEGQREYEEWLKEQEALQALPVAAMMDVENRRLKEELSTAKKEAIHWSNKYHDLWYDVKPYLDALHRAPELVRGFLEKILAPKQEHTMNVPQQNRTRGQDIELMARNDGVDRTSVRNLAVSDKAVGNTQQHNEREKDSYRNPDIIPQRAAWNVHFKKPTASYTDLFAQLEAAGTISTRGLKPDATHYCELVFDVNSAYFDNHGGYEFAKQFYEDAYKAAVQIVGGEQYILSAVMHADEINRAMTEALGREVYHYHLHVVYVPVVEKQILWSKRCKDKALVGTVKETVMQVSRSKKWASKPLMDDAGEPVLQKNGKPVLKKSYSILQDNFFNFMRAAGYTDIERGERGSTEEHLTVTQFKVQREQERLDSXXXXRKSSTSPKPTKPSPRPKRNLPLCRKRPRSQKKPSFMRVIWIISASAPFSATTRMKKNISRNPLWPDWYNGKKIDEVQFGRAFLEQWPLKCVNGTLYTLDGPVEDESEIKQRILENIEEYVTSGLSKKVTNILETIKLLAFSDPFPIEQDCIHLQNGVYHLPDGSFQESRLFCQNRLPVKYDPKAATPDRWLTFLHELLDEADIPTLQEYLGYCLIPSTKGQKMMLIVGKGGEGKSRIGLVLKRLMGDAASNGSVQKVENNRFARADLERRLLMIDDDMDMNALPKTNYIKTIVTAEAKLDLERKGVQSYQRDIYARFLCFGNGALTSLYDHSDGFFRRQLILTTKDKPADRTDDPFLVEKMCAELEGILLWCLEGLHRLVQNNFRFTVSERAAANVDTIKRSSNNVIDFMESEGYFRFKADYSISSKEFYDIYKQWCEDNACHSVSAIRFSAELRQNDRRYNLEATNNIYLPGGRRVRGFVGIEPLVHPCPMSLYQTVKSAITVRQVGEMYGMEPDRHGMVCCPFHSDSDPSMMLNESYYYCFACGANGDAIDLTAKLFDLNPRQAAEKLITDFGLDPDKPPANAIALPPPKRGLTDEQWADIAYCLRVLTDYLDLLHDWQERYKPASPEEPLDERFVEALHMTETIEHLTDCVAFGTPQQKADAAAQLLSGSYLLMLEERTDRLALAKCAMFFASCLNIRKILQERRKSGRTATEKEKCPHWLQGCNSKGREETVYMAQEYLPAPSNIRLADLMKEHNISQPELAKELGCSKSTINRFISGAKGTLTHEQVLKIARLFNVSTDFLLGETNIPDRKNYDIAELGLSVEAAKNLYTGRINAEVVNLLLENARFAELTYRIAQYFDDTFASGIAAQNAMLTTLSTLLRTKVKTPEAAKAAKDISLRRKPVYQGDLDDIEMYFMAAVKEIKKGIGSHYAEQEAMSKKVAEKMFTELTKGQDVQHPTITAEQLTDAMLDSVSGMEGATPEALEQLRNGLLGILQSAAEQENAHEADEMKQTNERLCALAQKGDAAALDSLIENNKSFIGKVANDLFRSMNLAQSGLNLDTDDLKQAGNLGLWKAVPKFDAARGMKFLTYAAPAIRNAMMDMVRDAFATFEQRMVTEDKDGVCYQRVSLDDVLPGEEQLRRIEAIADPYAMQPQSIMEEQESRRELYDGLKRLTQXXXXXXXXXXXXXXXXXXXXXXXXXXXXXXXXXXXXXXXXXXXXXXXXXXXXXXXXXXXKRRRNKLWITCGWNCRGGLIEWAERNCVKLTMLAMYLAVLDDQSSEEQFKDVYNTYKRLVYHTAYKIMGDSYLAEDVLQEVFLYVAKNFSKIHRENCHKLAAYLVSCSRSRAYDMLRKQREEPLEEVPDAPDDAPVPDDAAVSTDNIEHLTELIGQMKPMYRDPLRLLAMGYTNQEIAKSLGLTDEVVRMRLFRGRKLLWKELNSHEMSERAEVSFDAALMMALRADAQKELDELPSPAQLKERYPDTSRWDARLQAALHKRRPVLKRVLITVLTLVILTLGALAVSADFRRAVYTMIQKFLPIEMQLTYQVDGEPLEQLPNGYSDHYVPDGFEMDDAQKFERVENFLHVYSSKETEESYTVRCSIIQPGQQSLFDNEHTVYETVKVGEADGVLGTSTDKHGKNVYTLSWEYQGITHTVIGNIPYDEIMKIAEGIRMSVHKCPAFFLSELTKMENLKKFLLEIETKRMRIALIVQRLLIGAKKRRCMSMRGTKKYKIVKCFRHFGAIIILLWLISIVRFPYSFDKLQVLSNKNFESVSNSVLTLVDCKSTESKASIDFLLTDGKQYYIITAKRFFIGNRYDLSQLMPFSEGTSYCYTDCFTKVNVIQSGNKLCLDEERYVQPYILSFLFLCVVLMLNILGDKSTPEKMNGLDKVIERLNHAHAYVDVNDKNIFYYVDCSVIQDYGQVETFDNEHTVYERIKIGTADATLGTSNNGGRTGYVLVWEKDGISHTIIGKIPREEILKIAESISMSIYDEKKSKNNHNDCDLDFGDYTDLYKSHSLCDNRTSIETMQDSISIPLRLYLEAWRAGVKTIYYVRSKALEVESCESCSSMTELKKKPLFNPEGDPDVRLRRMIGGNTTNLNDFNNMKYAWVSDWYRQAMNNFWITLALFENQYSVQPMGVSYNSYVILDEKIAVMDSVDARAAEEWLSNVARVLEGRSPDYLVVTHMEMLWQSFYAASLSPSYLNRQPYGFLVQDHSIYLVQQEDAYTDNLDAALDLGIVMLHFSAVASQWVGQVRWELSPAAPDGLPEGLRSAAVYHMMAIQTVTDAIRYVGVDDNTLALFENQYSVQPMGVSYNSYVILDEMRSDRTRKDTAKRYIAVLALLLFCSIVFNVQTHYQRTTAIRPEDDYRGRISQFHSSVDRDDDGVDDQLDILNGALAYVSTHPKYKSRYYETGYPDDGYGVCTDVVAYALKNAGYDLQELVDVDIREQPQDYMVEEPDANIDFRRVRNLKVFFAHTAAALTTDVSEIEEWQGGDIVIFERHIGIVSDRRNKNGVPYIIHHNAPWQTAYEQDILEKRTDIVGHYRISKMLVNATEMLLKARDGHYGVPQFNINNLEWTKAVLTACEEMKSPVILGVSEGAGKYMTGFKTVAAMVSAMVDSMGITVPVALHLDHGTYEGCKACVEAGFSSIMFDGSHYSIEENVEKTKELVALAHAHGMSIEAEVGSIGGVEDGVVGAGEIADPEECAKITALGIDFLAAGIGNIHGVYPANWKGLDFEALDRIHKATNNIPLVLHGGTGIPDEMIAKAISLGVSKININTECQLVFAEATRKYIEEGKDQQGKGFDPRKLLAPGAKAIEAKCKEKIELFGCAGKGMATKIHIQCNIRLVRKRHGFSTYFNIRQNDVGGNCKSGQFLVQKIVIIPTMEKSQAVYGMYRHILWKTFCFGKTAEMRRAARAAGKTFLQLPCPAGKLRFTEKILGVRKMEERNQPRRPRRDAEQPQQKSESLIYGKNPVTELLKSGSGVDTVLIAEGMAPAVAAYYTALAKEAGATVKRVHPNKLRLMTGTESHQGVAAFASEIEYATVEDLLAAAKAKGEPPFLVLSDGIEDPHNLGAVMRSALLCGAHGIVIPKRGGASVTPTVIKSSAGAAERLPVARVANIGETIRRLKEQGVFVYCADMDGVSLRKNNLTGPIALVLGSEGSGVSQLVKKLCDGVVRLDMAAPGTGVDSYNVSVAAGIILYEIQSQRAVEEMPNNTNERKGKQAGELSAEERFRNFFSTSVIDLPEEMTRRDVPAPVEEKPKAGLLGKLFSHDKEGTPAPAQPVLEIPTGEILLGADAKPVQPEQEDMALELRTADPVPAMPLQPASPEPAKAVPAEPVPAPKAAAAVQPEPEKPAPQPEPQPAAAPKKQSKVKNAPETLLPQEELEQREMQQLKDMLNGMSGKAKPAPQPAKPVQTAPQPKVQPAPAQPAAEPEKVPAKAAAQKPAEELPPVVFASAPADPETLPKKPEKKSIFQMFGTAEDEKPAARKPEKEDTMSLPLLPLEQDGTPAAETAAYVSAPAAAATPAQPETAPEAQAAAPAEETVPESTTDKLHHMAAELTLRCVLAGILAVVLLHLGLTAERLLPPLSVLDPDAAPAAFYAANLLLFAASLFVGYPVLRDGLTGLRGRPSADTMPALAAVAALLQAVVAMLNANAYRSTEGIGLLTGMAALGLFLALVGSRVMLAAVQGGYALAAEGGELRGAYRTRDKDLIRALARDLEQKDPWVLLSRPVQTASNDFVEQSLSERASERRARKVACILLAAAVLSCVAFLLFGGGINCAVAAAAAVLCMGAPLSSVLVPGLAALRLQRAAAAVGAVVPGWAAIEELGGIDTIELDADDLFTADSVTLEDIRIFKGGRIDRAILYAASVLNESCDTLRGLFSQIIEDRTDILFPVKDLEQHTGLGFSAWCDNNRILIGTRRYMEQEGVTLPEQDYEDGHSKNGELQILYLAVSGNLHAMFVLRYVGGRNVARSLASLQRENIRLLVTSKDPSLTARHITEAYHLPEGMVTVLDGDQSQAIEAADAAPEKPDCCLYHHRGFASLTGGLQAADQAQNAETSATTVQLVSVCFSVFIAVLLTYAGSIWQLSIATVLMYQAAWSALSIAVCALKQHSMIVDLIEAFYRLLWGDLFTLPVAGGIGISFMVVLLFAAGIGFTLRTRLLPVRLFRDMIGAVCEKKQAAGGLSSFQTLVISTATRVGMGNLVGVVAAVSAGGAGAVFWMWVTALLGASTSFVESTLAQKYRVPDPLYGGWRGGPAYYLHVLAERKRGKKLKRSVCAALFAVSGLICWCGISQVISNSVSSAFENAFHIPPLATTVVLTLLAALIVLRKNATVKSLDFIVPVMAVCYFVITVGIVVLNLRQLPAVLARIFAEAFGLRQVAAGGFGAVLMNGVKRGLFSNEAGSGSAPCAAAAAECDDPVKMGLVQALGVLIDTVVICSCTAFLMLLVPQEITAGLTGMNLLQTAMQYHLGGFGIVFIAVILALFSFSTFLGVLYYARGNVAYLCGDNWWSQTAYKLLALAMLLVGGTQAYTVVWDLGDVGIGLMTIFNMLALIPLSGEALTALNDYEKRKKIKMPSAAELRHIQWNYYFAFAALRSVWSIYSINILDFTILLCCTIMKMQTYTTQMDAARKGIITPEMEIVAKKEYRTTEEIRQWVAEGKVAIPANKHHTCLNPEGVGSMLRTKINVNLGVSRDCKDYNIEMQKVMSAVNMGAEAIMDLSSHGNTQPFRQKLTHECPVMIGTVPVYDSVIHYQRDLAELTAQDFIDVVRLHAEDGVDFVTLHCGITRKTIEQIRKHKRKMNIVSRGGSLVFAWMSMTGNENPFYEHFDEICEICAEHDVTISLGDACRPGCLADATDVCQIEELVRLGELTKRAWAHNVQVMVEGPGHVPLNQVAANMEVQKSICMGAPFYVLGPLVTDIAPGYDHITAAIGGAVAAASGAAFLCYVTPAEHLALPNVDDVKQGIVASKIAAHAADIAKGIPHARDIDDKMGDARRVLDWDAQFACALDPETAKAIRDARLPEDDHSDTCSMCGKFCAVRSMNKALAGEYIDILMKCDKHTMLLYAVTDRAWVGEQTLYQQVESALKGGATCVQLREKQLGDADFLQEAIQIHALCQQYGVPLFINDNVEVALQCHAEGIHVGQDDMAAAQVRQRVGDGVMIGVSAHTVQEALDAVAHGADYLGVGAVFATHTKTDVSEMPRQTLLDICNAVDVPVVAIGGIHKENILQLKGTGVDGVALVSAIFAAKDIEAECRELRALSEQIIKMLKTAFENLRSRCPLIHNITNYVTVNDCANMVLACGASPIMADDAAEVEEITAICGGLNINIGTLNSRTVTSMLLAGKKANQLGHPVVLDPVGAGASHLRTDTAFRLLREVQFTVIRGNISEIKTLASGAGTTKGVDADVADKVTEENLDNAVAFAKAFAARTGAVVAITGAIDIVADAQKAYCIRNGNAMMSSITGTGCQLSALTAAFVTANPDQPLEATAAAVCAMGLAGEIAHQRLTPQDGNATYRNYIIDAIYNMTPEQLEKGANYEVRMKNLSVKKLALAGMFCALCVVGSVFSFPMFGSKCAPVQHMVNVLCAVLLGPWWGVGVAFVASLLRNLLGLGSLMAFPGSMFGALLCGLAYHKTKNLIATVVGEVFGTSILGGLCAWPVAIFLMGKSAADIAFYAYIVPFLISTAVGAVIAGAVVFSLQRSGALRSMQNSLSMIVTVFYTSFPKNARGEIETKAAVQGSARRLWSQKGEMKFGYFDDQNKEYVITTPQTPLPWINYLGSEDFFSLVSNTAGGYSFYRDARMRRLTRYRYNNSPLDMDGHRIYIKDGETVWNPGWQPTKTPLDSYSCRHGLGYTILEGKKDGVTARQELFVPKGDACELDRVTVCNGSTVVKELDLFSYVEFCLWDAVDDSSNFQRNYSTGEVEVEGSVIYHKTEYRERRNHYAVFWANCPVDSFDTTRDAFCGVYGGPADPQAVRAGHCSGSIAHGWAPVGALHIHLTLAPGESHSILFGLGYIENPQEEKFIAPGVINKTRAHAMMERYATDAQVDAARAALRTHWEQLLSTYHLESGEEKLNRMVNIWHQYQCMVTFNMSRSASYYESGTGRGMGFRDSCQDLLGFVHIIPSRARERILDIAATQFEDGSAYHQYQPLTKKGNRDIGTGFNDDPLWLIAGTAAYLRETGDWSILEEQVPFDNDATKAQTLMEHLRRSFNFTCTHLGPHGLPLIGRADWNDCLNLNCFSEHPGESFQITGPSEGPVAESVFIAGMFVKYGHEYAQLCDHLNLTEEAAAARKHIDAVEQATLTAGWDGAWFRRAYDAFGKPVGSKECTEGQIFIEPQGMCVMAGIGKESGQAAQALASVEERLDTKYGVVLLQPAYTSYQLNLGEISSYPPGYKENAGIFCHNNPWISCAEATLGHGDRAFAVYRKTCPAYIEDISEIHRTEPYVYSQMVAGKDAPTFGEAKNSWLTGTAAWTFFNISQYILGIQPTLDGLKVDPCIPHTLSGFTVTRRFRGAVYHITVDNAAGVQHGIKAVTVDGKAISGNVLPLAAAGTEVTVQVTMGMYAVPKVPENRRGFADYFKISVEIFAKSSCIFGWDTVCLAMPSLKDLAKECGVSVATVSKALNDQPDIAPATRERIRAAARRMGYLPNAAARALKTNRTYNLGVLFVDEKQSGLTHEYFSAVLDSFKVEAEKRGYDITFINHNISGKSMSYLEHCHYRGVDGVVIACVNFYDPQVVELVNGDVPVVTIDHVFNNRMAILSDNVAGTKALVQQAWACGHRRIAFIHGEKTAVTENRLAGFYQACEELGLKVPEEYVRCGVYHDVDRCAEETRALLALPQRPTCIIFPDDFSALGGYNALTEAGLSIPEDISVMGYDGIYLSRVVKPSLVTYQQNTKSLGRLAADKLIELIEHPRVTLPEQIRVSGKLLDGGSVRILMKKISRRNFLLASGVVTVGAALAACGGGSSSSTAASSAAPASSAAASAPAAAEGKVLNIWCWNDEFQSRFNDYYPEVKEIAADKSTTTLKDGTTVKWTINANENNNYQNKLDEALLNQDSAADDDKIDIFLIEADYALKYVDSDYVLDVKKDIGLTDSDLAGQYQYTKDIVSVDGSQRGTTWQATPGLFAYRRSIAKEVLGTDDPAEVQTYLSDWDKFNDVAAKAAAKGYKMLSGFDDAYRTFSNNVSAPWVTGTTVTVDENLMKWVDQTKEYTDKGYNNKSSLWDSQWASDQGPTGKVFGFFYSTWGINFTLLGNSLATPTAEGGKEEVGNGIYGDYAVCEGPQPYYWGGTWICGAAGSDNLETIKDVMLKLTCDEAIMKQITMDTQDYTNNEKAMNEIASSDYKSDFLGGQNHIALFAEAATKIDMSNAGPYDQGLNESFQNAFKDYFTGNVQEDAAKANFETAIKEKYPELTDVVWPAMGEKTKKKGSISYAKWGYIFIAPFFIIFAVFQLIPLASTIYYSFFEYYRSGLKIIGPNFVGLKNYITLFATDLPKYFSNTLILWIIGFIPQIVVSLLLAAWFTDLRLKLKGQTFFKTVIYMPNLIMASAFAMLFFALFSDNGPVNAVLLSMGWIKTPISFLNTVWGNRGLVGLMNFLMWFGNTTIMLMAAIMGVDPTLYEAAELDGCTPNQMFWKITLPLIRPILVYVMITSMIGGLQMFDVPQILTNGKGGPDRTSTTMIMYLNNHLFSKNYGMAGAVSVVLFLVCAVLCVVVYFSLTKEDDGLTKAQRKELKAAKKAAAKGGKMAHTPKNQSEKAILTARRAWCYLVLVLISFLCLFFFYVLIINSTRTHFEIQKGFSLMPGKSIITNFRNVLTDANIPVVSGIRNSLLVSACSAALSVYFSALTAYGIYAYNFKFKKAAFALILLIMTMPTQVSALGFLQLISKMGLKNSFIPLIVPSIAAPTVFFFMKQYLDASLPMEIVEAARIDGAGEFYTFNKIVLPIMKPALAVQAIFSFVASWNNYFIPALVLDTADKKTLPILIAQLRSADFLKFDMGKVYMMVAIAILPVIVVYLLLSKFIVRGVALGGVKGMIQPIMHDPLFLAQKSAPATPEDAPVARDLLETLTAHADGCVGMASNMIGVLKRIIAVEAEDGYLVLFNPVILKKSGQYEAEEGCLSLEGVRKTKRWQSIKVQYQTMDGKPRIKTFTGWTAQIIQHEIDHCDGILIMLACFNTCVGLIACVGEYFHTLLPHIPYPALAAFFAAASMLIANLGLADILRLSVPVLNALYPVAIVLITLSFVPGLEQRRRVYPLCIGCTAVQSIAAALPLGTLSALANALPLAALGFGWVLPAAAGLLAGIFLSCTEEMKQNKQFFRRLLAVAFWLAVWQAAAMAIGQEVFLVSPVQALRTLVQLLPRTDFWQRVGFSSGRILLGFVLGAVVSVVLAVCAARWSAADALLAPVMQLVKATPVASFIILALVWVRGSALSVLISFLMVLPVLYGAVRTGIAGADVQLLEMAAVFRLPAGRRLRAIWLPAVLPAFRQGCSVALGICWKSGVAAEVIGLPNGSIGDALYRAKITLSTGELFAWTFVIILLSAGFEKLFLFALDKAVGAVLGEEGAKCMLKIQHLTKQFGAVPLFTDLCMEVDTPAVLWAPSGWGKTTLLRILMGLERPTTGSVEGVGRVAAVFQEDRLCPQLNAVQNVTLVLPGAENQYKEQITSDFQQLGMDTAALQLPARRLSGGQKRRVALLRALWAPSDTLLLDEPFTGMDPDTLQRAAALLRQRCAGKPVLLATHDESAIRALGWPVVELKKLGRSMDSIRQYFKRTDKMYLLLCIFSSVMAVLALSSWAAKQGNGFATDEVTGAIIGIGDYRRALVQAGAAAIGIVIALLLSCVDYRSLVKVWPVHVVLTWGLVLPTLVIRNVSIGPLTIGYNAGDTDNYSWYKLGGFTFQPTELAKISFILTFAMHLNNVRSRINEPKELAKLLLHLLVPIAIIHVQGDDGTAIIYGIIGCCMMFAAGLSWKYIFAAFAAAGAAVAVAFAFFSDKIGKGYQWYRILAVLDPENTTGWAPSETVWKNIIYQQQRGEIALGSGGIFGNGLFTGRYYSVPNAHNDFILSWIGNVVGFVGCCVVLGVLLALVIKTFATGARSEDLLGSYICAGIGGALMAQIAVNVGMNLRVLPVIGVTLPFYSAGGSSVLMLYICVGLVLSVYSHNTKSLFSMEHTFYRRLLSAVCAIALAFTAVCPAVAAAPEETTGTPQTLTASEVKEMQQTDAAVTALTDSAAYAGMSEEERQAAALAQLDELAAQGLVKKDSIYVDAKNGMVSFTYSCGALGGILLTDTESEADAALPGPEMENAPALLAAENGTVGNAVIYYAFDNGVNSNRYPYYSYMKDYWNGYGLDTHLDMMVTVSDLKRMADYDLAVLSAHGAYYTYEYGWLWKKQATAPIILLLEKSDFWNDLRYGLELLSHRVIKVNGCYAVTGDFFGNAYRGGKLNGTIVLSETCEFYGRSGHVDTALSDGLLSGGAKAVVGFVNNVYSVYSRSMLWATVNRMIEGETLQQAIDYGLEVYGENDIVWYLNQNTGRHPHSAASYPIIQGDAAARFTAPGMATNSAVEQQTPAAAMSEYITHSRAETVALGKRMAAVLAPGALIAFTGGLGAGKTAFTEGLAAGLGCTDPVSSPTFAIVNYYRGPRPLAHFDLYRISTENDLCAAGFYDYLDQGAVVAAEWSENFADLLALENPIRVNIERLDDTTRKITIEGVTVMNILAVDTAGKTAGVALLQDDRLLYEVYLDGGMTHSETLMPMIDTCLKLCGLTCADIDLYAVNAGPGSFTGLRIGLAAVKGLAFPRETLCAPVSTLEALAAAHTGEGTVLCALDARRAQVYSAAFDLATHTRLLDDDARAVTDLADFVENCKKPLFFVGDGAGLCYNKYSNVPGVLQTPPALRGGRAAAVALVAKQMAAAGQAVLPEALLPDYHRLSQAERERAERLAAEAAANKQMAKPIALAADHGGFELKEAVKAHLEELGLEYIDFGTHSTDSVDYPDMAVPACDAVVSGQCEKALLFCGTGVGISMAANKIKGIRACCCSDSFSCEYTRRHNDANALCMGGRVVGAGLACQLVDIFLNTEFEGGRHQRRIDKLTALENRMTPMIVEHPLLQHKISLLRNKQTGTKEFRDLVGEIATLLCYEATRDLPLEEVEIETPITMAKTKVLAGRKLALVPILRAGMGMLDGMLTLLPAAKVGFIGLYRDEKTLQPVEYFCKLPQDIAERDVLVLDPMLATGGSAIDAITQIKKHGAKRIKFIGLLGAPEGIKALHEAHPDVDIYLGAQDDRLNENGYIVPGLGDAGDRIYGTKMTKDMTSGAITPLLIKFTIPLVLGNLFQLTYNAADSIIVGKFVGEDALAAVGTSNPLMTLAILFINGMCLGAGILVSTAFGAGDTELVERQVSTTAIAGTVFSLTFSALCVLLADPLLRLLQVPAAILPIAVNYLRIVFAGLIFTFFYNFLAATMRALGDSKSALYFLMISAVLNIGGDLFFVEALGWGSEGCALSTVLSEAACCLLCVVYIRYKVPVLQLGRRWLVYDGKLLRKTVSYGWASAMQQATVQLGKIAVQAIVNTMGVNAMAAFTAASRIDDFAYTPQQNIGHAMTTLMAQNRGAGKTDRVRQGYHCGMRIEFVYALLLTGVCLLFAEPIIRLFAADPAVVDLGVRFLRTISLFYLMPAATNGIQGFFRGMGDLKVTLNSSMLNMGGRVAAAALFVLVMKMDIEALPFSYAVGWLLMLLYELPLLVRFLRSSEMMPIYSNFYQTLTTACPIVELRGYAAACGLKGHLYAYLDFNGPTGTARDGLAEGMLALAIEKKQLAPGQPIIEAASGPFATALTLASLTAGHPIVLVMPEDAPALRQEYLLRLGAQIRHSPARSGLAGARALAAQTAAANGWYYMNWLANDDNPEYHRRVTGPAIVQSIARQNKSLVDAITIGVGSAGTVTGVGETIKAWTNDVRIVAVEPYENQVLGGGLTGPHGIPDIGYGIVPENYNSYVVDNVSAVASRDAQRAAQQVLRTDAIPASVSAGAALHAAAQLLANCNSRAALAIFSGRASIVMLRCKVFLLYGWSIPEPLPLVKGILEFFLKYLPKIRCFCQKASMAKDLEMGYLLDFYGEVLTQKQREMLRQYYNDDLSLSEIGENFGITRQGARDAIKHGETTLKELEEKVGFAARYRRVQQKLEQLEQLVIDTRFECTGPRANITTTEYVETLTKMLEIIRSMDEANESMAFESLTDRLAGVFKKLRGHGKLTEADIKAAMREVRMALLEADVNYKVAKDFCAKVSERAMGQEVMESLTPAQQVVKIVNEELVALMGGSEAARLNIKNKGQTVIMLCGLQGNGKTTHAAKLAKFYIKQGRRPMLVACDIYRPAAIDQLQVVGKQAGAPVFTLPGAKPPEIARKALAHAKDYGNDIVILDTAGRLQIDEVLMQELVDIKAAVPVDETLLVVDAMAGQDAVNVAKTFNETVGVDGIILTKTDGDTRGGAALSVLAVTGKPIKFQGTGEKLDDLDVFHPDRMASRILGMGDVLSLIERAQDAADEKAAEETAKRLMENKFDMNDMLEQFAQIRKMGGAGAMLSMLPGASGIDASQIDEKAFDRIEAMIYSMTKEEREKPSIINPKRKRRIAAGSGTRVEDVNKLLKQYEMMQKMMKQFKKSPKGFARRLGGMMGNPNAFRGLKMAVKIRLRRVGAKKAPFYRVVVADSRFPRDGRFIEEIGTYDPNKEPSEVKIDAEKAKQWIANGAQPTDTVRVLLKKSNVLMQELLLAVARGLVEDKDAVKVTVDEPREDGTIVYHLSVAEGDMGRVIGKQGRIAKAIRVVMRAAAVRVDEKVLVEIDMQQYLEAGKVVTTHGVRGEMKLELWCDGVDFLKKAGRLYPSAQGGKAYKILSIRPQGQMALLQLEGVSDMDAARALRGQVFYFDRNDATLPAGRWYVADLIGCEVRDANTGKVYGVVTSVDHPGAQDIYTVKAPGGKEYMFPGVDAFLKERNPPEGYILVTPIPGLLDDDFDSEREEEMGMRVDIVTLFPEMCQQVLDASIIGRAAKRGYIETHCHQIRDYTLNKQKQTDDYPYGGGCGMVLYAQPIADCLRAVQREVAQQGRPAPHIVFLTAGGQRYTEEHAKRLAEYDNLTLVCGHYEGIDERVIEAFADEEISIGDYILTGGELASLVVADSVLRLKPGVLAEQKGYEEESYWDGLLEYPQYTRPEVWEGRAVPEVLLGGDHAKIDAWRGEQSRTRTRLRRPELYEQWCTSHPIAEVPKWKRGENVRLVKTAEQFAAAAKLFAEGRQAVCADNWTPEYCRTLTEPQFLLQLQQEKAAGWVCYLHTTKDVPDGMVCVSHKAGHIEHLFVTEKARGNGIGAKLLDFARKKLPEHAHPVLSVLNTNTRAIALYTRMGWQLDGSTSLEFDPQRYPTVTRKCALVQMRYAGPAQEMYVKEVTVENQVGLHARPATFFIQKANEFKSSIWVEKEERRVNAKSLLGVLSLGIVGGTTIRIIADGADEQAAVDGLIKLVESGFAEMTKAELYQKACMLPLLPGVYIIRDKSDTIIYIGKAKRLRIRVSQYFREGVPHDNKVSQMIAHAYAFDVIVCQSEFEALVLEASQIKAHTPKYNILLKDDKGYSYIRVTREDWPRLSFTLQKEEDGAEYIGPYTSSFAARQMAETAMDAFLLPRCSKRFPQEIGKGRPCLNAHIGKCMAVCSGKISCETYNQAVKNAVHLIRYGKKDILKTLNERMQEASDRLEFETAALLRDQINAITKLTAGQKVVVDPDVEMDVVALAGTPDSVCAAVLRFREGRLTDKREFLFHDTSDIDAVREEFLPRYYLDDEQIPKIIAVDALPPDVDALQQALNQKRGSEVQLYVPQRGDKAHLVEMAHTNAVERLARESGRYAREEKLLDELAQVLGLSKSPRAIESYDISNWGDGSSVCGMVTFKDGKPFKAGYRKFKMKTVAGTDDYASLAETVSRRAAEYEKYAAQAESGQSSGNWFGQKPDLLLMDGGRGQVSAAKEALAGTALADVPLYGMVKDDHHRTRAIVDSDGREIAINMNRGTFTFITAIQDETHRFANAYRKQQMKQKSYSSTLTEVPGVGPKTAKALLTQFKSVGAVKDATPDQLENTPGVGRQLAQTIYDYFHREAMTRTAFLAALEQLLAPLPEAERKDALSYYEDYLDAAGPENEARAIAELGSPEEVARKILDEQTPAGSSAAPASPARKPHSRWRMVLGGGLAVLVLACFFFQHSKATPVQPVEPVSSASEIPASSAEVSAESTQPQAVDSVSASDGLTFSLSAEMVHDKLSLKLDYGTVLFVVDPNASDITLQFDGFRTRYLTHSSEKAGTTEFSYHIPKYNALPDSDSALLTITVPENILHEVDIDLAMGDVDLGTLSLDELDLELAMGSVSADSLTVKDADFDLAMGGCHIDHLSAPEFDAELAMGDCTIGMLSGAQDVNISVTLGKAALTLEGSASDYTLVTNGLMGTSIQDGKANPSRKISLSTTTGDLSISYTNMSFPISAALLDAIVLSVVAQEPEGTYGYKITQQVTHTLELSESTLYPVLRRLQKDQLLTVYDAPFNGRNRRYYQITSAGRAQLAAYAQEWSRYRSSIDTFFREVEMKRRTFISLMGVMAAAGVLSLTGCSSKDTAASTASSAPLNKLDSIQKSGKLVVALEGAWQPWSYHDASDTLVGYDVEVSRAIAEKLGVEPEYVESDWDSLFAGLDAGRYDMVCNGVEVTEERAKTYAFTTPYGYIHTALAVRKDNEDIHSFEDLKGKTTANSLASTYMELAESYGATVQGIDTLEETIQLLTAGRIDATLNADVSFYDYLNVHPDADFKLVAQTAEASHVAIPVLKSEDTAYLDALNTAIEELRADGTLKTLSEKYFGQDISSENMAMLEIRNVQKTFRTYAKPGLFHRPGARKVISDLPVLRGVDLTVEKGDVVAILGPSGSGKTTLLRCLNFLETADAGQLVFDGESFDLAHASRADIARLRKKTAFVFQNYNLFRNKTALQNVTEGLIVARKLPKEQADEIGMKMLAKVGLADRADYYPRQLSGGQQQRVAIARALAADPEIIYFDEPTSALDPELTGEVLSVMRQLAEEGMTMLVVTHEMGFARNVSSKTVFMENGVVVEQAPSQQFFASPKEERTRAFLRRIAHTEMFEALLSNRTVSVLMEALPRILTAGLTMTIPLTLLSFFFAMIIAVAVALVQYANVPVLRQIARFYIWVIRGTPLLVQLFIIFYGLPSVGIMLNAFPAAVIAFAFNEGAYCAETMRGALESVPQGQLEAGYCVGMSWWQIMRRIVLPQALRTAVPALSNSLIGMIKDTSLASNITVAELFMAGQRVAARTYIFLPIYCEVAVVYLLFCTVITKLQALLERQLNARGFQMLDAVGAFVYNEHNSARVRGNGPARRKSTGRGLPLARCRHGGYEREKVMKKFSIGVLGAGTWGMALARMLTVSGNDVQVWSAIEAEVDNLSTTRVHPNLPGMVIPQELRFTKSIEEVCTGKDVLLFAVPSVFVRATAAKARPYIRSGQIIVDVAKGIEPDTLYTMTEILADELSHENGPRAVRLVALSGPTHAEEVALDLPTTIVSASPDLEAAEVVQEVFSNTCMRVYTNTDIKGVELSGAMKNVIALGVGISTGLGYGDNARAALITRGIAEIARLGVAMGCNVQTFAGLAGIGDLIVTATSMHSRNNRAGILIGKGESPEQAVKEVGMVVEGINALPAAMELAEKYHVEMPIAQTVNAIVKEGMSASDALRNLMSRDRKSEMPQGYESVMQCQRPPLCSGCTDQKFYRFQYSRKFADLLPFCVCFLMPSTYAHRRFGANVLDHLPAPLREKLEAHRELYDIGLHGPDVLFYYHAEKSTPVAALGNAMHDEPGRTFFDRARRVVHEEADREAALAYALGFVCHFALDSTCHPFVEQFTRESGVTHCEIETEFDNMLLRRDGYDPLTFFTASHIHPSAENARVIAPFYKDISEQTALESLKGMILVHKVLQASNPVKRWVVLTGMKVLGKYDGMHGLVANPQPNPQCTESNRKLDALYARALPLAERLILEYVAKLDTDEPLDAAYDHTFGEFMKTEKFKVTPLERAWILYDVGNSAFVLMIATLVPIFFNALAEAGGVSKVDYLAYWGYASSIVTVVTAILGPILGTLADTKGFKKPIFMLCLFVGVIGCCAMGLAGTWLAFLVIFIIAKIGYSGSLVFYDSMLGDVTTPERMDMVSSRGYAWGYIGSCVPFVVCLALVLGSSAVGLSQMTALSIALIITAVWWLVVTLPLLKKYRQINYVEVEQHAIRQSFVRIGQTLKHLPQDKQVFWFLLAFFCYIDGVYTIIDMATAYGTALGLDTTGLLLALLVTQIVAFPSALIFGRLSQKYESKTLIPVCIAAYTGIAVFAFFLKSQWQFWVLAVVVGMFQGGVQALSRSHFAKIIPQEKSGEYFGLFDICGKGASFLGTMIVSVGSQLTGSANVGVGSIAILFVIGFVLFGISTRTEQTKQVMYQKYYYCVQKIPMRFQRRTGQCGPPELLLSHSGAHSHSRGQHTVHIRCRCPVGMHSPTAIIRVQQFFPDQLHLCALLPVKLFHPSMYHPPENLCFISLQDWWIGCLHYIPFYLVCQMSEYKFETLQLHVGQEQADPTTDARAVPIYQTTSYVFRNSQHAADRFGLADAGNIYGRLTNSTQDVFEKRIAALEGGVAALATASGAAAITYTIQALAQAGDHIVAQNTIYGGSYNLLAHTLTQFGVNTTFVDAHDLAQVEAAIQPNTKAVYLETLGNPNSDIPDIDAIAAIAHKHGLPLVIDNTFGTPYLIRPIEHGADIVVHSATKFIGGHGTTLGGIIVDSGNFDWKASGRYPNIAAPNPSYHGVSFADAAGPAAFVTYIRAILLRDTGATISPFNAFLLLQGTETLSLRIERHVENTKKVVEFLANHPQVEKVNHPSLPDHPDHALYQKYFPNGGASIFTFNIKGGREEAFTFIDNLKIFSLLANVADVKSLVIHPASTTHSQLTDAELAEQQIYQNTIRLSIGTEHIDDILADLEAGFAAVRGKMKMLNKKFVRTLSCAAVAVCAAAMLSVGAFAAEVDSTCVEGYLPPQEQMVQGDIALHSGDVAVGEKDPSYGGYGAPEGNPIQGNIMLISGDELADTAKTEARYTVKGLLGKQLLYTARQKDGVLTLDVPAEVATFRTTIEDMQTLQANGVKTLVLVTEKNTTTLNLSLLCEGQKSGTRVTLRHLGSNATLSVGLRCRRDLLIGRMKEVKPSKKPLAIYYAIVLLVLLVINLVVMPWLAERQVQEVDYGTFMSMTEQENIGKVDIQSNQIIFTDKDNKQIYKTGLMNDPSLTERLYDAGAQFSSEIVEQGSPVLSFLLWFVLPILLFSFIGNQMNKKLMEKAGGGPGSMMFGGAGKSNAKVYVQSTHGIRFADVAGEDEAKENLQEIVNYLHDPKQYEEIGASMPKGILLVGPPGTGKTMLAKAVAGESNVPFFSISGSEFVEMFVGMGASKVRDLFKQAKEKAPCIVFIDEIDAIGQKRNSGQFGGNDEREQTLNQLLTEMDGFEGNTGVIILAATNRPDSLDPALTRPGRFDRRVPVELPDLKGREEILKVHAKKVKIAPGVDFNTVARMASGASGAELANIVNEAALRAVRAGRKSVTQADLEESIEVVIAGYQKKNSILTDHEKCIVAYHEIGHALVAAKQSNSAPVQKITIIPRTSGALGYTMQVDEGNHYLMNKAELENKIATLTGGRAAEEVAFNSITTGASNDIEQATKLARAMLTRYGMSDEFDMVALETVNNQYLGGDTSLTCSAQTQREIDQKVVELVKTQHEKAIRILTENRAKLDELAQYLYQKETITGEEFMDILNRDDAENKPENPMMDATKYAPGYYPVPAGYDSWVKKDHIEKAPAWCSVDLRDGNQALIVPMSLAEKLEFFQMLVKIGFKEIEVGFPAASETEYEFLRTLIEKDMIPADVTVQVLTQCRDHIIRRTFEAVKGAPRAVIHFYNSTSVAQREQVFHKSKEEIKQIAVDGAKLVKQLSEEYEGNFLFEYSPESFTGTEVDYAVEVCNAVLDIMQPTPERPMIINLPVTVEMSMPHVYANQIEYCDKHLKYRDSVIISTHPHNDRGTGVACAELAVLAGAQRVECCLFGNGERTGNVDAVTLAMNMYSHGVDPKLDFSDMPAICATYERVTRMHIYERTPYAGQLVFAAFSGSHQDAIAKGMAYRKQTGEHRWTCPYIPVDPHDIGRTYDADVIRINSQSGKGGIGFVLEQNYGYNLPPKMREALGYKVKSVSDHSHKELSAAEVLHIFEDTYLNRAKPLNVVEAHFAQVNGITATVTLELNGQRKVVTSVGNGRLDAVANAIQSATGMDFHLENYSEHSLDEGSTSRAASYVGLVWGDNTVTWGAGTDTDIIVAGIRALVSAINNRMGMTLTQKILAAHAGLPEVKAGQLINAKLDIVLGNDITTPVAINEFERAGFDRVFDKEHIAIVLDHFVPNKDIKSATQSKQCREFANKYDILNFYDVGQMGIEHALLPEKGIVTAGDCVIGADSHTCTYGALGAFSTGVGSTDMAAGMATGMAWFKVPSAIKFVLTGKFNPRVSGKDLILHIIGMIGVDGALYKSMEFTGPGVAGLTMDDRLCICNMAIEAGAKNGIFPVDEVTKAYLAGRSQRPPVFYEADPDAVYEKTIEIDLSALEPTVSYPHLPENTHVASEGKDIKIDQVVIGSCTNGRLEDMEAAYNILKGKHIAKGVRGIIIPATMAVYKECILRGWTTAFIDAGCIVSTPTCGPCLGGYMGILAAGERCVSTTNRNFVGRMGHVDSEVYLASPATAAASALTGYITDPRTVMNARGSVFKYPDNVDTDVIIPARHLNTQDAKELASHCMEDIDKDFVNRVQPGDIMVGGWNFGCGSSREHAPLCIKTAGIAVVIAKSFARIFYRNSINIGLPIMECPEAVDAIEAGDTVQVDFDTGVITDETNGKVFHAEPFPPFIQNIISAGGLMKAIQKMEKNIAVIWGDCSSPEIVKQTLRVLDKVAEKYGHTFHYTAAAMGGEAIDKYGDPLPQHELDKCLAADSVLLGAVGGPKWEGLPGEQRPEKGLLRLRAGMGLYANNRPAKIWPQLAPASPLKPEIVAQGIDFIIVRELIGGVYFGQHQTHTLENGEKQAVDTMPYAEHEIERIGRIGFETARKRRKKLCCVDKANVLDTSRLWRTVMHRLQAEYPDVEYSEMFVDNCAMQIVKNPAQFDVIVTENMFGDILSDEASMITGSIGMIPSSSLGDGTRGLYEPIHGSAPDIAGKDIVNPTACILSAAMMLRYSFGMAEEADAIENAVSRVLDKGLRTADNMSDGCTCLGCTAMGDAILAELMTDKILEVRGLTKTYGGVKKRGAKKADPTLDVLKGIDLDIYRGDVVCLIGPSGCGKSTFLRCLNRLETPSSGSIKFEGVEVDEAHIDPVRQKMGMVFQHFNLFPHLTVKKNLELAPTLLKLKDKEAISARADELLARVGLADKANAYPKSLSGGQQQRIAIARALAMDPDVILFDEPTSALDPEMVGEVLELMKELAHTGITMLVVTHEMGFAREVSNRVIFIDDGKIQEDEPPQELFTNPKHPRLKAFLSKMLMAAQYELLKELLNSGTKLSFEQDFFFKFYQAFLLKDRWMQYISGVGTTLLVTALALALGVVLGSVVALVRVTHDQQRPGHKNAVLGFFNAVCQVYTTIIRGTPMMVQLLIMSMVIFSNSRNFTMVGALTLGINSGAYVSEIIRGGLMAVDPGQMEAGRSLGLNYMTTMVVIIIPQAIRAVLPALGNEFIILLKDTSLITTIGGKELLYAAQGIMNRTYEAMFPLLGVALIYLILVMLFTWLLSKFERRLAQSDRMKKISRRSFMAAAAVSVAALALTACGGSASSAASSVASSAASSEAVSSAAAAELTTVEAGKLTMATNATFPPYEMTTDSGEIEGIDVDTAKAIAEKLGLELQIDDMEFDAALLSVQQGKADIVMAGVTVTDERKAVMDFSDSYATGIQSIIVPNDSDIASPDDLAGKKIGTQRGTTGYIYCSDDFGEDSVVAYDSGLTAVQALNNGQVDAVVIDNAPATEYVAANPGLKVLDTSYAEEDYAIGMAKGSALEDAVNKALEELKADGTLQAIVDKYINANMSLSFTIQPPYPQKTTPQPLLCAGASVILYIVFFRFVFYRIKERFIMSVMELLTTRRTYRRFAQKAVPQDVVDDIVQAVRLSSCGANRQAVRLVLVQSPEMVAKVQPLVKWAGYLPPEQGTPKADELPTFYAAVVQDTAIPGDLATDTGIALANMTLAAWDKGVGSCIMGAINKPALTALLGIEEPQKLAFMVAFGYPTHKASIVPMTEQTGVKYYLDENRDYCVPKRSAEELARSLMSNISRRQFLKGAGVATLAVAAAGVLAGCSAEEVLTKDVKVVFMCNGATVGDQNYLKVAQDKTTVKVSEIPNNYFPVGYKTVSTGELKIAKLPTGEDGVKVMLDEIEVPVDIYYYEVVDGKEVDRMIFEGVTVYASQKTITKKVAEQYAGDTYTVVGDGPFTINWSNNTVRVEAKKNMMSLTAAQIGELTAQFFLAAAGTLSFAILFACPRRCLPYCALVGAVGWLWYELLTLLGADAATASLLAVIPLTILTRVFAITQKTPVTVFLLTGIFPLVPGAGIYYTAYYFIQNENTLALAKGISTFKIAVALAIGISLVLCVPIPKKRRKMNSRDHFPDEELRRRIMDFIMAAGQTLLENGAEVFRVEQTMEIMARSFHLREFHVYVLTNGIFASAGTAEISGVRNVPVRTTHLGRVAAVNELSRQIAQTGMTLDEAESRLVLARQLPFPKDHVQLLSGLCGAFCFAMMFGGNLRSALAAAGAGLVASWYLLWCGRHEVPGGFQKISTAALITLVCILLCNLLHTSASHAIIGTLMILTPGIAFTMGIRDFVQGDYLSGTIRMIDALLIAASIAIGTGLVLRLYTVLTGVVVVMITRRDFLKVTGVAAAAAALTACGGSSSTASSAAASGSVASSAAAKLDKIKVAVPNDTTNEARALTLLEKNGFFKLKADAGLTATKNDIEENPLNVTVDEVEAAQVPNVLQDEDYAVINSNYAISAGLNPMTDALAMEDGSSAYVNILVCKDGNQEEPKIKALAAALQSQKVKDFMDETYKGSVVSVVENPTDGYDSTVDYDALNGQTVSCAATPAPHCEVLEVCKEILAAKGITLDIQEYDDYVIPNQIVEDGQVDTNYFQHQPYLDNFNAEKGTHLVSVAGIHVEPMGVYGGKQDSLAPIEGMIELKYLSKTFQMKDGAVKALQNINLTIPDGAIYGIIGMSGAGKSTLVRCINLLERPTGGSVVIDGVAMETLSPASLRKRRREITMIFQQFNLLMQRTCLKNVCFPMELAGVKKAEAEKRAMELLEMVGLPDKANAYPAQLSGGQKQRIAIARALATNPKVLLCDEATSALDPNTTHSILTLIKDINRKLGITVVVITHQMSVVEEICDSVAILDGGVVVEQGSVQEIFANPKTAAAKRLVAPNGGSAARDLSCFAPDDHVVRVTFNGSSTAKPLVASLAAEKGILVSVLSADTRDLSGQCYGSMLLKLPAELAVAQQAVEYMRSQSGVTVEEVTGIMNIAAYGFAIWETFYVTVLSTAFALVLGLPLGVLLVAGDKDGILPLPGWLMHLINIVINILRSVPFLILMICVFPLTRAIVGTTVGTKATIVPLVVAAFPFVARLVETSLRELDEGVVEAAQSMGATPFQIITKVMIPECLPGLISSMTTALTTILGYSAMSGVIGGGGLGKIALSYGYYRYQTNIMIVCVVLLVLMVQAFQSVGTLWATKSDKRLRKMNRDTICVQGGYTPGNGEPRQIPIIQSTTFKYATSEDMGKLFDLEADGYFYSRLQNPTCDMVAKKICELEGGTAAMLTSSGQAANFFALFNICEAGDHIVASSTIYGGTFNLISVTMAKMGITATFVDPLCTEEELNAAFRPNTKVVFGETIANPALTVLDIEKFAKAAHAHGVPLVVDNTFPTPVNCRPFEWGADIVTHSTTKYMDGHGAVLGGAIVDGGKFDWMAHAEKFPGLCTPDDSYHGITYAERFGKEGAFITKATAQLMRDFGSMQSPMNAYMLNLGLESLHVRMQRHCANGMAVAQFLENHPKVAYVNYCGLESSPYHALAQKYLPNGSCGVVSFGLAGGRQAASTFMKELKLAAIETHVADARTCCLNPASSTHRQMNDEQLAAAGVPAELVRMSCGLESAEDLIADIAQALDKVMPLIIPKTLPAFDALYEENVFVMHRERALAQHIRPLEILILNLMPTKIATETQIARLLANTPLQVHMTLLQTASHSATHVSAAHLEAFYKTFDEVKNNRYDGMIITGAPVETMDFEQVDYWNELCEIMDFSETNVYSTLHVCWGAQAGLYYHYGVRKQLLPEKMFGVFEHRVTRPANPLVRGFDEVFYAPHSRHTGICREDVDNCAALRILAESDAAGPFLMSTENGRQIFVTGHPEYDKYTLDAEYKRDVAKGLPIHVPVNYYPDDDPTKPPLFRWRAHAHLLYENWLNYYVYQNTPYDLGDIQRVKHEKMSKIAILTDSSCDIPQEMAEKYGIDIMSFHILLDDVDYVERVDCTNTEFYDKMRAAKGVPSTAAITPIQFCEKYCQYVDEGYTDVIHVPINKSGSSTYNNALMAQGMLREERPEHHLNIHLLDPHTYSMVFGWYLCEMARKLQNGAEIRHVIHEFERQMNCMEVVLGPYSLRQMKKSGRISAAAAVMGELMGIRPIITLIDGKTKVEAKVRGDEKVVPAMVDLCQKRAGDVEDFEYMIGHTNIPQAADLEKACRKAFGKPPLAVFELGGVVSANTGPDTVALTYTGHPRGMMDKPTLNIVLVEPRIPQNTGNVARTCACTACRLHLVGPMGFAIDDKKLKHAGLDYWHYLDITYYDGLADFFARNNGPYYYFTTKAPQRYTDVQYPDGAYLVFGREDAGLPEALLAENQEHCIRMPMRDTCRSLNLSNSVAVGVYEVLRQWDFPELLDHGHLRDYEWKMQKPVEPKKILCIHDLSGVGRCSLAVILPVLSVMGFQPVALPTVVLSTHTGGLGTPARMDGSAYGMAALEHYQTLGLQFDCIYTGYLGGEAQVALAEKAFALWPAAYKVVDPVMGDNGKAYSTVTPALVERIRSLCRAADLILPNYTEAQLLLQQQPVTDELDDSAAQALADALQPLASNAVVTGLPLGKYIGCAGTGADRFVIKKLHISRSFPGTGDLYGAVLIGSLLQGNALSAAADNAAEFVSLAIQGTPYTQDTRFGVWFEPLLPRLCPLREEPEGILMKQRENSAAGMVVGMATGAVLGAAGAMMATQSKRQMRRNVRKVMKGAENAVMQLDKMAADFVEKHIDCMTTALKRTGAALLTLLMFCMLTLGASAAANTPVGVKFWKENSDKESMANSGIDSDREATLARQSNGTYTLMLPVKQVTKLNVTGCLTGLTIGDVTYTGTLTGEIEKGNGILTIKNLPASVLTGSDVNKALTVTCNIQMDLSLLGEINTTARMCIWAKMSFRGINTTVIQIRRQVFTEVARMAYANVKGEQANHLMRKIPYTIIPGEEGKLRKDIFLERAIVEERVRLAMGLPTRRMDEHNSVVSGLEDASIADKYYDPPLVNVIKFACNRCPEKLVKVSDLCQGCLAHPCMEVCPKKAITWESGRSTIDQDKCIKCGRCVTVCPYNAIVKTERPCAAACGMGAIHSDELGRAEIDYSKCVSCGQCLVNCPFGAIADKGQIYQLIQGFNRGDRIYALVAPAFINQFPSLASTGKLKSALKAIGFCDVVEVAIGADLCTVDEAHDFLEEVPEKLDFMATSCCPAWSMMAKTAFPGLAKNISMTMTPMVFTARMMKQADPDARMCFIGPCAAKKLEASRRTVRSDVDFVLTFEELAGIIEAKDLDLDNLEVDPAEMDLCYASAAGRGFAQSGGVAKAVADKIKEWRPDMEVKIASAQGLADCKKLLMLAKAGKYNGYLLEGMGCPGGCIGGAGTIADPVRTAAVLNKYVKDATFTDPEQSAFMSNIHMLKDDPNFEVMLRNSQKTEPPALCAEHKNGAIRARMVPCWLLTARRTRMRVCFYTLGCKVNLNETGALEQLFRANGFTIAQEGEAADVFIVNSCTVTNFGDQKSRKWLRRKKRENPGAVTVLTGCYPQAFPEEAAQFMEADLVCGNGDRKAILENVQKLLDGHERIVAIAPHQRGEQFEELPVERFETHTRAFIKVEDGCNRQCAYCVIPRARGPVRSRAEESILAELHQLAAAGYREVVLSAISLPSYGLDTGTNLVELVEKCAQVPGIERIRLGSLDPDMLTPEFISRLAAVDKLCPQFHLSLQSGCTATLRRMRRVYTAQEYAQVVEQIRAAYGSRPVSFTTDCICGFPGETAEDFEESCAFLKKIGFVKVHVFPYSRRSGTPAYDFPDQIHEREKQERSRRMNAVAEQVRCEALAAFEGTEDEVLLETPLSGTLFTGYTRLYIPVVVSAPGCESGQIVRVKLGRYDGERVRAALCMNLSRRNFIKIAGLSAAAVAGAALFTGCSGQLMLPVRFSATVIGKDIQKALDTKQFSVVASLKPDAQENAINAFVRRQLPLSMYEVDFIERKTDTLDGKETDYLFVTLKNSMERRNLALLCAGVVCFWLFALAFGTAQGRGLRIQPAVQTQAEPAAQTLTVTPPQLTLPCRAAILIDQTSGAVLYEMNADQTMPIASITKVMTLLLTFEAVHAGRLTMDTAVPVSEHAYHMGGSQIWLEPGEQFTLDEMLKAICVSSANDAAVAVAELVGGSEPAFVQQMNARAAELGMEHTTFRNACGLDTEGHLSTARDVAIMSRTILTTCPEVLHYTGIWTDTLRGGQTQLVNTNKLLRRYNGITGLKTGTTGGAGVCITASATRDGLNLIAVVLGAPSSKERFEAATTLLDYGFAAYRAAPVPLPQERPLQLKVKGSTEETVPLDYAALPTTALLPAESAGQLTVQLELPDTLEAPVTRGQTVGKAQLLCGEAVQGEYPVCAAADAPRMDFGTALQLLWDSLRGTAAMSVALNTKHLSSFISEEEYAAIYPQVEAAHKQLEAKNGPGSDFLGWMTLPRDYDKEEFARIKAAAAKIREDSDVLVVAGIGGSYLGARAVVEAVKGMYHNELEDGLKIYFCGNSISPTYLNNIISLCKGKRFSINVISKSGTTTETSLAFRVLRELLEKEMGVEEANKRIYATTDRAKGTLKQLADAQGWPTFVVPDDVGGRYSVLSAVGLLPIAAAGIDIDALMQGAADAMERFSVLSPDNDAYKYAAIRNILYRKGKAVEILECYEPDFTLMNEWYKQLFGESEGKDNKGLFPASCIFSTDLHSMGQFIQEGARIMFETIVDVKKPAQDLFIDPLEGNFDGLNFLANQNMSVVNRKAMEGTILAHTDGGVPEVLIEVDDLSAYNVGYLIYFFWRACACSGYLLSVNPFNQPGVESYKKNMFALLGKPGYEGLTAELEAKLKMIKLIVGTKGSGKTKAMIDQINDAVKTSKGNVVVVEKGMKLTYDIAPAARLIDLDEYKISGGEMLYGFVAGLMASNYDITDLYIDGILKVLDHDINRLGVVLDEMAAIAGDSVKVTVTVSADEAALPHDVKKYLMQFDLRKFITAGTRPYHAEFQCDLSAYDYAGARIPQPVTAVFDAQTDGDEVQITLRAKASVHGECARCLDPVTREETVDTEWIVKERDLDDPDFDLPLDEKGHLDVDEWLNQEFMFQIPTVLLCSPDCAGLCPQCGKKKAECTCPPAEQTDAPVDTRLAILKSLLNRMAVPKRHLSKARRDKRRSNVWKLEAPALVKCSNCGSLKLPHQACGNCGYYKGEEVIKKAMAIRIEQVDAGSEAEALGLAPGDELLSVDDNELNDTLDYDFYTDSSSFHLKARVADGIREWEVQRPQRGPFGCGFKTYLGDAKHSCSNHCMFCFIDQLPPGMRESLYFKDDDERLSFLFGNYITMTNMQDHEIDRIIKMHISPINISVHTTNPQLRVRMLANKRGGEVLKYLPRLVEGGIAVNCQLVLCRGVNDGDELRRTLADLLELTPMVQSIAAVPCGITDYRKNLYPQVPYDAKTSAEVIDIMEEFGDECKRRHGKRIIYPSDEWYLKAGRPIPAAAFYEDYDQLENGVGMMRLFEEEFLAELDKPHRIYGTKELDVVTGTMAAPLITRMMEELHRQYPMITVHVHTIQNRFFGGNVGVTGLITATDIIAQCDGKLATKTLGIPAVMLREEKDTFLDDITVEQLGQQLGVKVEVLPTAGGDEARALLRSGLHIARRRKSGSMSKPIVAVVGRPNVGKSTLFNKLCGQRLAIVEDTPGITRDRIFANCEWNGHEFLLVDTGGIEPKATEGILAHMREQAQIAIDTADCIIMVTDVRNGLTAADEDVAHMLRRSHKPIILAVNKCDKVGEAPMELYEFYNLGFDEVMPISSVHGHGTGDLLDAVCAHLDFSETVVEEDRIPVAIIGRPNVGKSSLTNRILGENRMIVANEAGTTRDAIDTPVDNAYGKFIFTDTAGLRKRSNISDGLERYMVVRALAAVERSRVALILVDATVGFTEQDSKVAGYAHEQGKACIIVVNKWDAVEGKETNTMELQRRGYAECFSFMGYAPIIFISAQTGYNVNKLMQLIRDVDAENGARVPTGVLNEMLARATARMQPPSDKGRRLKIYYLTQASTRPPTFVAFVNAKHLFHFSYQRYLINQIRENFGLEHTPIRLVVRERGSGEVGAKDVMKSVLIAVVSAVQAYLLGSIDTGILVSKFLYHDDVRKYGSGAAGMTNMLRTFGKKAAALTAFGDVLKGVLAVCIGRWLFTLMPESTMLSPYLAVYLAAIFAIIGHLKPLYFGFKGGKGVLVAGGTILAIQPVLIPFLAVIFLACLLPTGMVSLGSVTMAALYPVLTILYGVFRGYSAADLTVCTIGSVIMAAMVIYMHRSNIQRIREGKEYRFGRHGKKMEHPSHPVESHWRTSLRNRIIQASSLLEVLLSGLVLIGLLLSVVPLIRWMPGLLFDGNEAEIRTFLERSLDIVIGIEFIKMLAKHSPGSSLEVLLYAIARHLVVGHDSAVENLLSVGAIALIFIVRKFFFVPAFGAHLPDGHPAPDLTPAQSGIPADWFRRRHSEAKPEEETETKEMKNAKISRRSFLLGLAACSAAGVLTACKGTDAPSGSTASSAAEPPASSAASSTVQQPEPFLTEAEFPPLDGSTACIPLMAQMLADTTGMDLEEARSSITVSTTAYAWENFGLYDTTTRMLVVYEAPDYVKEELQKANVELEQKPIGVDALVFIVNEDNPVQALSQQQLRDIYAGKITNWKDVGGKDQEIVAFQRGEDSGSQTLFKKLLIQGGELMTPPSELAPAAMGELVDSIADYNNSANAIGFSVYYYIDQMYSKPGLRLLAVDGVTPSNDTLADGSYPLCNDFYAVIHPDAAADSPERRLYDWLDTDAGQDCIKKSGYVAVGPQTTVTIVDMKRVVLRIGCGAVCTALALTLGCGCTLLPPATGVPGAASSAVSVPTDDNGKPLYDPAVLNDSRLRVLYCDSRSGSSTTILCGSTPLHQSTRSENVSLVEDSVTGTADYWLRSWSDPTGRGGRRTALYDKTGTEVMSFEGEQSATLQNGLLVLQESRLIDGGYVPESGYGTCQVIDLATGAALPVPEGAYSCTLCGDKLVFSCYARPEGLDDYDWDTDYQQNRWVVVQEKDGTPVYRAEAASAYRLFYDSDTLSDWVKLDVATGEETTDQILYNTQTGEQYTGFLQVYPGGLASFSTSDGRYELRDMTTEDRGLISTFDEQPSQYFPGYVVTWHSGEGHGYELYDLETGAKTPLYDVDATDNTVAVYALDGSLRVYSKDNGKLLTDTTVEPVEHQQRVRMSNCGTGYVWLELQDNDRYETTATRLYGPQGLVSDLTALQGKYSYVNYLTTDPDGRPMFYGSRAAAGSAYGSVCDVLNADGKVVLQGLSSCTGYYSNSLNALPDHVFAAQRGFYVGWMDTSGNWLYCQSIFSSATADDVPSYGYMTQQDRTAVQYHKMTETPIPRLILSLAAPTILSMLITSIYNLADTFFVGRISTSASGAVGVVSSLMAIIQALGFMLGHGSGTIISRRLGSQDTHAATRFASTSFFTALAFGVVLAVVGLATLPDFMMLLGSTKTILPHACAYARPILLAAPLMISSLVMNNILRYEGKANLAMVGLVTGGLLNIALDPLFMFALGLGTAGAGIATALSQTISFGILLYMFLRGKTVSQFRLSAVTREPREFLQILAGGAPSFGRQGLNSIGGMLLNIAARSYGDAAVAGMSIVSRIFMFILSVAIGVGQGLQPVASFNYGARKYHRVRQAAVFTLKAAFALLVVLIAVCWWNDENLIRLFRDDPAVTAVALPAFRYQCFAILLQPVIVVTNMTFQSVGKAGRATFLACCRQGVCFIPLILVLPRVLGLVGVELCQPIADTLTCFISLPFLLAFLRQLEQMDKAEASHAPAQLMHRFFQFLLIKNTTYRDFSQVIRQFFSTLYRIHPVFACFFAPSQGRKAVFTPSRHFVATALYCFHQDYLPLWKGRLSRFMKSVAQTVIEADRFYTIAAHTGNVIQAVEGSKDGGTVRLGKYDHKPEQEWSFVREGDGVYRIRNRASGKLLDLTMTGTANGTWLHLWEDVGGTSQMWKVEHTPEGTVRLRSSWAGGKCVDTVGIGAEVGAVLQIWQEVPGGGDQLWVISEVKDRVKRAAKVEQAAPAAETKAAPAKEAAPAKKPAARKPRTAKKVEEKPATPAAKAAEPVKAEKPAAKKAAKAKAEPAAPAVEVKAAPAVATKAEPVTKAEPATKAAPAAETKTAPVAAKPKAKRAPCKKTVKKMASSHKKRTGLRAALIVLLCLVLVCAVAAAVLYSFVSRKVKAFQSGASFALDYTITSTEAEPPALYALLDKFGGTTGSLTGQYTPRAVQLALYPTGTSTVNDAPLTRMYISEEETLYDAGQLYNKLRSTVVAEYPLASLLLPGWSLGSYISQDQLATLLGVDPAATGLQQVNDFQLDLKQLKTVQPANAKEGYLYLQLPNLAAGEDAPQLILGIEKQGLLKTLSPKVHILLDVPAHHIHAELTGTVTAAQTVVTAPTSRMQDSDVESLVQLRKTIESIVQFVQTAAQSDDAAASPAAMGGCPWRSTIIPESRLFVKDFFEKNQTFLKMTKKREKVFCRMDGKHKKPLTHLMTYSEVLANARTCIGQYCKACPVCNGVACKNQIPGPGAKGVGDTAIRNYNKWADIRVNMDTLCPGGAPDTTLELFGKSFRYPFFAGPVGAVNLHYSDTYTDMTYNDVLVRACAENGIAAFTGDGTNPTVMEMATRAIGAAGGCGVPTIKPWNIDTIREKMAQAKASGCFAVAMDVDAAGLPFLKNMTPPAGSKSVEELTEIVQLAERPFIVKGVMTVKGALKAKQAGAAAIVVSNHGGRVLDQCPATAEVLPEIAAALKGTGVKVLVDGGIRTGVDVFKALALGADGVLICRPFVTAVYGGGAEGVKCYIDKLAGELADTMQMCGAHTLAEITPDMVRVMKILKVKCLAPTRLDNYLTQQYPALTPGRLNKALRENKIKLNGKKQPLSTRVMAGDEIKLFILDDVLDADRRVEGPAWKNARTPAQVVYDCPQILIVNKPAGVAVDGPEDDTLLNRALLYLNKQGEYKENDLYTPALCHRLDTGTSGLVIIAKTPEAEELFLSAIKNREVQKTYLCVTFGRPMPPDATLGGYLLKDADRGIVKIVEDKQPGAKEVETRYETIAVSGRLALLKVQLITGRTHQIRAHMASIGCPILGDSKYGNNSANRELKLKYQALCAWELTMPRFTQPDFAFLSGKTFHAPKPWYYQQVLDGTLKMQGVLLSDPLSDGTYHISFESDKVWVGERKNTINNAVVYDYDRYTAADIEALSEGDTIITHLNGTEEITALTVESVERENNYVTINGGIEEGGIDLCKEDDHYRTLTWDDFPAYYEVGVVKQLVMADDIELSDGAADFEADPVIVKGDRAVCDAMSNEEDAYGWNAGNTTVTIQNGEITRADRIWVPMQWTGLNELREKYLSFFESKGHLRLDSFPLVPKNDPSLLLINSGMAPMKKWFLAQEEPPRHRVTTCQKCIRTPDIERVGITARHGTFFEMLGNFSFQDYFKDEVIPWAWEFLTSDEWMAIPKDRLHISVYEEDDEAYDIWTKKVGIAPDHMVRLGKEDNFWEHGSGPCGPCSEIYFDRGPEYGCGKPTCGVGCDCDRYMEIWNLVFSQFDADGKGHYERLARPNIDTGMGLERLACVMQNVGNLFEVDTVQSVLHHVEHIAGKTYKQDPKTDISIRVITDHIRSCTFMVSDGILPSNEGRGYVLRRLLRRAARHGRMLGIDHPFLVDLVETVIQSSESAYPELREHDAYIKKVIGTEEANFARTIDAGMNILNNMIDRLEKAHQKLLSGMDAFKLNDTFGFPLDLTKEIAAEQGLEIDEDGFHAEMKKQKERARAERLKKNISGWSEDLFGALEAEPTVFTGYDTLTDKGTVVALSDEETLTDAIATDEEAKDGVLVVLDKTPFYAEMGGQAADHGVLNGAECSLRVLDVKKTPKGYYVHTCVLESGIVKVGDVLTAQVDKGYRMAIARNHTATHLLQAALREVLGDHVHQAGSYQDASITHFDFTHFSAVTPEELARVQKIVNDKIFDSMNVTVQEMPVEEAKKLGAMALFGEKYGKVVRVVDIEGWSTEFCGGTHVKNTAQIGGFKIVSESSVAAGIRRIEAVTGRNLLIRANLQEAMLHDVANTLKANNVAALPARAEAVMAENKAMSRELEEMKAKIAASKVDSLFDNAEEADGVKIASAYFTGTTGDTLRGMCDSIRDKAVNPVVAVLVGKAEDKITMAVTVNKLAQEKGLKAGVLVKELSAIAGGKGGGKPDFAMAGLKDETKIDEALAAVSAIVKKALGMEDCLFCMIAEGKIPSKKLYEDDQVVAFYDINPQAKVHFLVVPRKHISSAAVLTEEDGALLGHIFAVIAKLAKEQGLENGYRIISNVGEDAGQTVKHLHFHVLGGEKLPVMAETYTLHVAGLTRELTICKVNDHMDIAAFIMLGDAELTVAAAAELLKKCPDFDILLTAEAKGIPLAHEMSRQSGKPYICARKGVKLYMPDPVVVEDQSITTAGKQKLVIDRKELEKMNGKRVLVVDDVISTGGSLKALDALAEKTQCTIVGQAAVLAEGDASERKDIIFLEPLPLFFHMPFAAFFVAFLLLLCIPDGSRKLALCLLLGALAGLCAVHTTSARLERARANYAGRTVLLTAEVERADSNYFSDTVDATLWVESVNGSPASFRITCAELPACTAGQRVQGWFALQQPDMEEQTAQYADGIALQAEPLAEKPQLTVLGESGSFRACTHRLQQKLSESLRRAMHRDTGGVLVAMTVGDRSGLSAQLRSAYRGAGLSHVLVVSGMHISILCGDIFTALHPRGWEQSYRRRRRRAVGKSLLALVLMGVTGFTPSVCRAAVAVWVSALGVWVWGPPDALTSLAAAGILMTAVNSYAVWDIGFELSFAAVVGTVAGNACIRRIRDTRDRRFWVKAGENLQKPVRRPWYSKLPKGVQGLAESACIAACASAATFPVLVLRGLSVSAWAVVSSIAVLWMVQPLLLLGLAVAFVGLVPWLAPVHGVLSRAADLLTGLLNGWAVWLSTKPGASIYFNTAYAALVCLLLCGLWVLAFRWRVRLRVALPGILLAAAVGIGLGNALSRDVVHIDLVGSAQAPAVVIAQNDRAVVLFRGGSAAQRAVENQLARRGVRTVELVVDLRMNAKTACTLPAQQGIRAERLPVNTSRKLRCTPAAVELLRTREGCLVRLSIGNRQFVTLNGKAELAQSLQTEWLIATPKKPETVQYQKLLALRSYSWMTPETQYTASLSLRRTGGESMATEAKLRQLADKGCPVYYFYSSERYLVRQAVAAAVRMLSADSDEDATILDGAAPELEQLIMAAGTISFFGTRRVVVLPEIDPAAYGSKDLDELCSTLASLENAVAVLGSVFPLERGKLKLGKQAQKLQAKCKAIGYTEELAKPRPFELKNLMMERAKAQGATLPDGAATALLERCGEDPFLLENEVDKLCALSGYQTVSASMVAEMGTVSLEADVFEMIRMITAKNATGACKKLQTLLRLQQEPIAITAAMIGSYVDLYRVKLGAAKRKNYSAVHKDFGYKGSDYRLKRSAETAAHYTLPQLEACLQVLLELDQSLKSQPVAAQTLLETALCRLALAGSGRMMQNEMIHTDRVLIVEGKYDAVRLAHLTDAMILLTDGFGIYKDKQRQQLFRALAQKNGLILLTDSDAAGFRIRNYITNMVGAENVVQAYVPAIHGKEKRKAQPGKEGLLGVEGVDDALVRQALLDALGAEAGAAPVRPAGRQITYTDLYEWGLSGKPGSAERKARLLNALGLPPRLSKKELVEAFNRLYTFEQLDELQLKILQEMLLTLLQFFATKFLFLALHLESGCFPRPLTAREEAAAFSTLRAGDAAAREKLIRHNLRLVAHIVKKYYALPGDQEDLVSIGTIGLMKAVDTFDATRKARFSTYASRCIENEIRMQFRRERKSGQTVSLQEALEADGDSALTLADVIQDGFCMEDSCERQEDVRRLRQLLDTLPARERQILLLRYGLAGQPPLTQLETAGLLGISRSYVSRLETHALELLRQAWGKNSMEYKEYGSKNNDIIILLHGGGLSWWNYIDEISLLENEFHIVIPILDGHSGSDTNFTSIESNALEIINFINKNYNGKVKLIGGLSLGGQILLEILSKNPNICECAIIESALVMPMDFTYKMIEPIFNLSYCLISKKWFSKLQFKSLKLKKSLFALYYEDTCKITKDNLIAFMKSNSNYEVKNTLSHTKAKTLVLVGSKERPIMKKSATKIVHLIPNSELEVLQGYYHGDISINHADDYVERVKRLVRMPKEPKITALYERLSRDDDLAXXXXXXFKNIRHFTDDGFSGVNFNRPGFQSLIKEVEAGNVETLIVKDMSRLGRNYLQVGFYTEVLFPQKNVRFLAINNSIDSNNASDNDFAPFLNIMNEWYAKDTSNKIKAVFDAMEIRKRNGESVPFQQEKIFNAMKKAFDGQGKEIGSREMDEILATVLNNLSVTVPLTVERVQDEVERTLMERGHYEVAKAYILYREKRSALRRVRHTIARTVGDDSLDEVLRRIQMDFTEEVYSLAALQMKFESFCRLGMTEDERAEALTKAAVELTTAEAPKWEFIAMNILVTGAKGMVGTALCNNLKNIRDGKNKTRPMSKEKLLLVGAGGFGRIVVEQAMLQYDCAFVDDGQPVGTDICGIPVVGSLADLPELRKEYGLLVVGIGNNRFRAQVYEKAKVLGFAFPNIVAPSAYISPYAKLGCGCVVLQNACVQNGASVGNGVLLNAGTEVHCDAAVGDYALIYTNSVIRTGATVGNFTRIGSNCTICNNATVPDGADIPDCTAVHNTTRLDVEGTVKKILTTEYVQNALKGIPNVPMLFQTTSAHEELRAKIRSFAEEEIKPLAFLMDQNNEFPDEAVKKLGKLGWMGIPYPKEYGGAGLDALSYAIAVEELARVDGGTGVILSAHVSLGSWPIFAYGTEEQKKKYLVPLAKGEKIGAFGLTETNAGSDAGGTETTALDKGDYYLLNMAAVLSLFGAKQERKLLFRNTGVSMDAPVFFFVKEAAKTCMNYAIVFRLLGYVLMIEGALLLLPAAASLVYGEWMVLGVFLLTAAVSAGIGYALHTIKPRSKVFYMREGFAATSLCWVFISVMGAVPFVLTGCIPNPVDALFETVSGFTTTGASILPAVEGLPNGILFWRSFTHWIGGMGVLVFLLSLLPLTGGSHVNLMKAESPGPQVDKLVPKVQSTAKILYGIYFALTMLELVFLLIGRMPLFEAMLTAFGTAGTGGFGFRNDSFASFSPYIQWVVTIFMILFGVNFNAYFLLLMRKFRRAAASEEVRGYFVVIAVAVGIITANIYSMYNSFGEALRQAAFQVGSIITTTGFSSCDFDLWPTLSKEILVMLMFIGACAGSTGGGIKVSRFLILGKTLAKELKTALHPQVVAPARMDGKLLNHETIRTTNVFIAAYIFIFAASFFLISLNGFDMVTNFTAVAATLNNIGPGLEMAGPMQNFGCFADPAKLVLIFDMLAGRLEIFPMLVLFMPDTWRRFMKIILVGGGKVGTALARQLSEEGHNVTVVDTNKARVEHLTESYDVLGIVGNGSSITTLSEAGIEDADVFIAVTGSDELNLLCCMFAKKAGHCHGIARVRNPSYSHELDFIKKQIGISAIINPEMAAAKEISHLLRFPGASKIDTFADGRVRLIKFALPDALDGVAIREIPTRLKSDILVCAVERDGGVIIPNGNFVLQKGDQVTFLATQEKAHAFFQQLHLPVQPVRNALIVGGGAIAYYLSQELLENHVRVRIVERDAARCVELAEQLPGAQILNEDGSNREFLLSEGLESTEAFVALTNIDEENVLLTLFAKKHSNGKLVTKVNRLEFDDILAGLDLGSVVYPKYMTCDYIVQYVRALQNEAGNNIKTLYRILDDRVEALEFTVHEESAATGVPLSQLHLKKNLLLCCITRGSKILIPRGGDQIQVGDNVIVVTLEHGLHDLRDIVEHMRIYDLIAKKRDGGTHTREELEAIVNGFVSGEVADYQMAAWMMAVYLRGMTNEETAELTDVMAHSGVMVDLSPIPGIKVDKHSTGGVGDKTTLVIAPIVAACGVKIAKMSGRGLGHTGGTIDKMESVPGTKTALSQEEFFAQVNQIGLSVIGQSEGIAVADKKMYALRDVTATVSCIPLIASSIMSKKLASGSDAILLDVTTGTGAFMKTVDQSIELAQLMVAIGTHHGRRVAAMITDMDTPLGHNIGNSLEVMESMDVLKGHGPADLTEVCLQLAANMLVLAGKGDAAHCRAMAEAVIADGSAFAKCKEMFAAQGGDIRVLDDYSLFAQPAASYELLAEQDGYIVANDAEKIGSASVLLGAGRQKKGDPLDFAAGITLHKKRGDYVHKGESLATFYGAADKFEAAAAEYRSGLVYGAEKPEEAPLVYALVTKDGVERYMEKRVFLIVLDSFGIGAEPDAAAFGDAGTNTLGAIANHPNFNCPNLRKLGLFNIDGVTAGEKTDAPAAAFARLQEQSMGKDTTIGHWEIAGVVSPEPLPTFPEGFPEELIREYEQKTGHKVLCNKPYSGTQVLKDYGEQAMRENALIVYTSADSVFQVAANEELVPVQELYRYCEIAREMLKGKYGVGRVIARPFLGNSADTFYRTTNRHDLSLKPPRATMLDLLKDAGKDVIAVGKIYDIFDGEGVTEKIKTTGNTNGIAFTKALQTRDFEGLAFVNLVDFDMLYGHRRDVAGYAAAATEFDRFLADFLPGMREGDLLMITADHGCDPSYTKTTDHTREYVPYLVCGKGVKAGTDLGTKLCFGTIAQTICEYLEVDASTLDGKSVWQEIRAMGVKAPGTAGRFIWQSGKTQNSTTYYYNHSGAREQEEFLLEYKFLHLLMPKGKIAKLLTMRRSFLRAVMRKTKIICTLGPSTDKEGVLRDLIANGMNVARFNFSHGSHEEHLGRLEKLKALREELGKPVAALLDTKGPEIRLKDFKNGVENLVAGQTFTLTTRDVEGTNEICSITYKDLPMDVEPNGTIMLDDGLIKLQIQTVNDTDIVCTVLNNGKIKNKKGVNVPGVHLSMPYMSQRDKDDIIFGIQQGYDFIAASFVRTAQDVYDIRNLLNQYDSNIRIIAKIENREGVNNIDSILAAADAVMVARGDLGVEIDFTELPGIQKTIIDRSFSFGKPIVTATQMLDSMIVNPRPTRAEISDVANAIYDGTSAIMLSGETAAGAYPVEALKTMSAIAERTEQEGFHLRGRTMDSNPGKISVSDATAHAACLTARDVNAAAIVTVSESGTTARLLSKYRPQQPIIACVMREQVQRQLSLSWGITPLMMSLAHSTDELIEMSTALAKENGYLHNGELAVVTAGVPVGVSGTTNMIKIHMVGNCLATGVGVGPENNDVASGKACVCRTMDEVRAKFKPGMVLVVPSTSNEMLSFVRDAAALVVEEPGLNSHAAIAGKALLKPTVVGAAGATSHIRDGLMVAVDCAHGSVQRLQGMERIASFCVDHTRLERGMYLSRQDGDVLTWDIRMKKPNQGDYLTTAAAHTLEHLFATYARNSAVKDGVIYVGPMGCRTGFYLLTRGLTPAQALQLTVDAYRFMADFEGAVPGASEVECGNYRDMDLPAAKAEAAAMLPVLESLTAEDLHYMKQKLIFLDIDGTLLPPGEMLIPQSTVEALHKAHANGHKLFLCTGRNLRMTQPLLDYGFDGAVCSAGGYVFCGDKVLVDLPMEPQLAQGVRSAMERHGVECTLEARDATYGSLKMIERWSFTHRDAGPLNSEAARWRKAMEDGMTMSPLAEYKGEPLYKIVYIAERSEDLDEAKRLYEDRFVFCESKLDGLNGGYVNGELINRKFDKGRGIKAVCDYLGVPLQNSIGFGDSDNDLQMTDVVGISVCMADGSASLKQRCDRIAPSVYEDGIAKEFAALGLIMTISDIAKMAGVSSAAVSRYLNGGPLSEQKRAVIQAVVEKTGYSPDTAAQTLRTGKVRQVGVIVPSISSQSVGQITSGIAAELGASRYLMLLADTELDGQMELEYLTALQRNHVAGIILLGYDSSPQLCKALKDCRVPVVVTGQRFADLPCVYNDDRSAARDLTRKMLEHGRKNIVYIGGSEQDAATGIARRQGVQDALREVGLNADGLPRAYCAAFSMEEGHRCMEELLARCPQLDGVVCVTDTVAFGALRVLRDAGRKVGQDVGLAGIGDNWAGKVVEPGLTTIRFYQRQVGQEAARMLLQSLEHTGPDAAPVRQTTLGYTLVERGSLMLIINPFHISRKRCNDRFSVGLPAAFLVILHNPNNLAFMPEQALQVAFEIKTACDEISRRLLRWHWERKPGAHSLDALLEHIAARKQESPDYYDRMPDLTGKTSWQQLDTTLCMRVLLDPETDAARPLDLLGNTAHPSAARHACNAIRTARNEAAHAAVAADGAQAALLFNEAIEALEEGYAGTAFKENELAQYYREAEDYLSRCSEGKPLKVRQSSPQNAQQGKAAARTKPRNPQTVRSTKSTAGRQNTSARSRSTGTKQSRGTASRSKKQQTGGESRVALGIILAALVLGLIARAISMGLVMEENFNPVAQTRANYYTPGSPVQFVCVELLKGDVSGEHAVCLTFKNISRVTLTALEIHFKCKGVDGVILCEDKFEYRDLQVKPGELFGQDDAVFITAKAITSVDVSLCNVYNGKRVVHLDGIKRVRLPAPRRLAPELQKALEARMNRTGLKYQPQVFENGWYCACGAFHPTEEDTVYCSECGCDRILLQNALNTLLQPAAPADEMEMPLSAPAAPAAPAAVEEPTRIVGAAPAAPAAPGEEPTRVVGAPVYEPKADPIQPVSEPTRVLDASVRAPLSGAAAADEGTRVIPARRPAPVRQPAPVEDEGYEEYEDSRDSVAEALIRWVPPITAILCAAIALCGFVYYQFVLMQPKKPRFNPLVIAIVLAAVLMVWSVLGGTGGSASGSSMAYSTVVHYFESNQVTKFSLDLNTGVITMTLKEGAQELPNAAEQSTTQSTGGLLSGLLSSSSSAPTGVKKNEDGTETVSYKLPYARMFVDHVSDYIAQYDAANPDAPMVYDYVPAKETIPWMEILFYLAMLGCTGFLLFSMMRGGAGGGGIMNVGKAKVKDEHENKKTATFADVAGEDEEKEELKEVVEFLKSPDKFNTLGARIPHGVLLVGPPGTGKTLLARACAGEAGVPFYSISGSDFVEMYVGVGASRVRDLFDKAKKTMPCIIFIDEIDAVGRQRGAGLGGGHDEREQTLNQLLVEMDGFEANDGIIVMAATNRADILDKALLRPGRFDRQVYVGLPDVKGREEILKVHTRNKPLAPDVSLKVIAQRTAGFAGADLENLVNEAALLAARRNRKAITMEDIEEASMKVMAGPEKKSRVVTPEEKKLTAYHEAGHAVAGFYCKHHPRVHEITIIPRGQAGGYTMYLPEKDRSYVTKGEMFEDIVSSLGGRVAEQLILEDISTGASNDLQQATNIARQMITRYGFSERLGPVVYGTSQEETFLGRDFGQGKGYSETTAAEIDSETRDIIDEAYETCRRTLTEHIDQLHALAKALMEREKLNEEQFNTIMAGGTLPPCEDAKPEQAQPDQTVQPAPVQPAEPAQTAERAEPAEQAEPAQPEVPQPDAPEQQDMSMHDDIKTVLVSEEQLKAKVAELGAQISRDYAGKNLVLVSILKGSVVFMADLMRAVSIPCNIDFMVVSSYGGSNTTTSGLVKIIKDLDGDLSGKDVLIVEDILDTGVTLSNLVPMLKMRNPNSVKICTILDKPSRRKANIQPDYEGFQVPDEFVVGYGLDYDEKYRNLPYVGVLKPEVYTKMDTAILARVEDFCIREGLLQPGAPQHLAAAVSGGADSMALLLLLRQLQPRFGYTLSACHVNHGLRGQSADRDEAFVRAECARLGVPLRVFHAAELTPPPAHAGEDWARRLRYTAFVQLQGQGIDAIATAHTANDQAETLLLRLARGTGLHGAGGIRPRRGCYLRPLLCLSRAETEAVCRAAGQTWVTDETNDTDAYARNRLRHSALPALKSTNAAAVQNLARFCEKAARADAYLAAGAAKLLAAARLPGAEPAWQLLPLQAADPLLLETALHSLVAPVRDAEEKYVQLLCAVVRQGSGAVQLTGQVRFCAGNGCLRQEMLPDALPRQLESAPQQVPLLPEKQPEFRLRGGWKGKAELLTADFEKKIQVVHKKDLKNRADYARITTLYTGLVLRARQPGDRFRPAGRGLSKPLRKWMNEAGVPNELRDTLPLLASGSEILWVCGEGFADGLAPDTESRWILHLNAEIETQEEKTNEYARMPNERRYSNELNLESVGINLPYNMQAEQSVLGAVLLKPDTLTDLVEILKPEMFYTRQNAQIWTEMLRLFTNDQTIDFVTLLDAVVSDGVFPSADEAKIYLTGLAETVPSISNVKAYAQIVQEKYLVRQLMGVAKDILQDAGDEPDADLLLENAEQRIYEIRSGRDSSALTPLSSSMVETLTNLQKISGPDADKYKGIPTGFRLLDTVLTGLGRGDLVILAARPGMGKTSFALNIATRVAMQQKVPVAIFSLEMTKEQLTNRILSSEAGIDSQAFRTGALRAEDWEYLALATEKLHDAPIYMDDTSGITITEMKAKIRRVNQDPARPNVGLIVIDYLQLMTTGQRSENRVQEISSITRNLKIMAKELNVPIIALSQLSRAVEKQGNNSSHRPQLSDLRDSGSIEQDADCVLFLYRDSYYASQNPDGAEVDADTAECIVAKNRHGETSTVPLGWDGAHTRFMDVDFKRMKVILKQDIKGIGKKDEIHEVSDGYARNYLFPRKLAAVADASAVNMARGKEAAADFHEAENVAAAKALAAKIEGKTVTIKAKGGASGRLHGKVTGKEVAEALAALAGAPIDKKKIELETKDIKDAGVFNGKVRLYVGVVASFKIQVEVEQAMKQYDYLIVGAGLFGAVFAHEAKKAGKKCLVVDKRDHIAGNIYTENVEGINVHRYGAHIFHTNNKAVWQYVNQFAEFNRYTNSPVANYHGQIYNLPFNMNTFNKMWGVVTPAEAKAKIEEQKAAAGITDPQNLEEQAISLVGTDIYEKLIKGYTGKQWGRPCTELPAFIIKRLPVRFTYDDNYFNALYQGIPNGGYTAMVEKMLAGTEVRLNVDYLADKAALDTLAEKVIYTGPVDAYFGYRLGALQYRSVRFETEVLDTDNYQGNAVVNYTDAETPYTRIIEHKHFEFGTQPKTVISREYSAEWKKGDEPYYPVNDEKNGTLYAQYKALADAEPGVIFGGRLGEYKYYDMDKVIEVALDVAAKELAMKRKPRWTLEMLTASLAVLCGLLLLVLLVQRPTAWLLLAVLVVLWGIGATLFRCKLRRWVVRWTSGTTFEKSKVQFSLEPLSQPAALLSGETVLWYNSQFRTRLLGGQDVLASRVQKLLPGLDLQLCRKREGQLLTLADGYWSVHSSTVPGEAESVTLLVLNEETELRRIEAEYKASRPGYLAFQLDGYDDVFGDLMDSERARLLEGVNRILEDMIGRGSGFLRRVGSGGRYIAVVEERQLEQFANRGYDVLDKIRALDPSVSLSMSIGIGRGARTLREAQDMAEHALDMAQGRGGDQAAEMTLDGFTFYGGVSHGVEKRSKVRSRLVADQLVKLIKEADHVVIMGHRMSDLDAIGAAEGVLRICKICDVPAVIAVRRDATLAASLIDALCKAGQKDDFIDPKDALPIISKRTLCIVVDTYQAGLVESKDILEKCGKVAVIDHHRKGVGYIENPALVCHEPYSSSASELVTELLQYVGERDDKPNRVEAEGLLAGILLDTQDFTLHTGVRTFEAAAALRRYGAETERVRRLFDVTMVEYNAKADLVEKAQMYKNCAISIGGEVAPEARVAIAQAANDLLRIQGVDASFVAVQVGNGVNVSARSMGAVNVQVIMESLGGGGHQTMAAAQLKHITPQAARSRIQDAIDQYYLSQKKTTPEARPAKGEMAQTKENNPAPRAKAPAAPKAAAANGTAPAGEKRTRPTTRRPYYNRRPRRAQQPKEAAIPIHIYPLGGLGEVGKNMTVYECNGDMIIVDCGLVFPDSEMFGVDMVIPDFTFVVQNKDKIKGLLITHGHEDHIGSIPYLLQKISLPVYGTRLTCGLIKNKLEEFGLAGKTKFVEIVPRQKIKLGCFTVEPIHVNHSIPDAVAFAIDSPAGTIIQTGDFKIDYTPLACGVTDLSTLSEYGQRGVLALLSDSTNAERPGFTATEQKVAAGVRSLFARARNKRIIIATFASNIYRVQQIIDLAVEDGRKVAFSGRSMVNNTAMAQELGYMHIPEGTLISVDELNQYPPEQVVLVTTGSQGEPLSALSRMASCSHRQVRVGPGDFIIISANPIPGNEKSVTKIVNGLLLLGAEVIYESMYDVHVSGHACQEEQKLMLTLTKPKYFLPVHGEYKQLKKHALTAASLGIPTSNILIAENGSNVILSQDEMKLGEPVTAGAVMVDGLGVGDVGNVVLRDRKHLSEDGLVIIVATVDSKTGKVLAGPDLVSRGFVYVRENESLMDGAQSIVENALERCVDEHVRDWNSVKTRVREALSSYIYRRTKRSPMILPILMEVMKQVEVYTDGACSGNPGPGGWGAVLRYRFDGKVYEKELSGGDASTTNNRMELTAFIEALRQLKEPCEVRLCSDSQYVINGLEKGWAKGWKRRGWKKADGSPALNPDLWAQALEQEARHKITYVWVKGHAGHPENERCDQLAVAQSKAHGGRQGTMSDAFLPGNGFDTYETQDKVLVSMDGSVDCGVVVRILQQQGFGVAGAVVQLAADQSAWAAAARQAAEALGIECIVLKAEALADQPAEVLGSGNDARFAALLTAADKLGIQYIATGHHARVELGSDGVHTVCPAVDAALDESAALAALPQDTLARLLLPLGEFTAADVQEMAQDFKVNGTVMTIALIAHDSKKELMVQFCTAYCRILSQHKLVATGTTGKLISEATGLQVQRFLAGVQGGDQQIASRIACNEIDLLLFFRDPINAKPSEPNEMTLLRLCDVHNIPMATNIATAEVLIHGLERGDLDWRDIVHPQNMNENERKVVVRRMLLLIAVACIIMGLYTFRLIFLQLVNGDSFKAKATNTTDYKFTVTAARGNIVDSTGKRIATTSTGYNVVLNKLQMGDQDLDTMLQQIVELLRQNDEKWLDTLLISEPDAAGNYTFTDSADSTSDQKTLADMKETLGLQQYATANDVMEMLVEKNHLESFSLPWQRVLAGIHYEMDRQAFSNVNNFIMAENVSQVTVAAIKEHSLTLPGVEIVETSTRSYEQGDILPAVLGRVGKITAEKWKVTDENGQVTYPLKEKGYNMNDVIGISGLESVYEDELRGKDGVETITRNSDGVIVDTKITTVPEPGHTVQLTINSDFQRAVDKALANNIDMINRVYNTGDMKAAACAAVVLDVKDGSVLAAANYPSFDQNLYATNYSEYSADPSLPLFNRALQGLYTPGSTFKPAVAVAALDSGLINQYSTVNCTGVYTYYKDYHPRCTRHGHSGNIDVVTAIKWSCNIFFYDVGRRLTSDVYDAYAYKLGLGQRTGVEVNEAVGRLTKKTDKNYTSSLDIQAAIGQGNTVVSPIQLATYAATLANNGVRYRTHFVKAILDTNTGEVLSETQPEVMDIIEGNGNTFDLVRQGMTLVPSTISGKISSYPIAIACKTGTPQRSETYASGKHYLNAMMIAYLPADNPEIAIGITVEYGGYGARTGDLVVDIANAYFAMKDGTLEVDPYVDPRTVVQEDAAASDTAAQTAPDAANDAQTDAAAAEPQQTTAPAGVTEEENNDAMLAQMESRRKRSRSQLLKWGCYVLALFVCAALQTTPGLFQLGQAKPLLVLPLCLAVAVFEGEFAGALFGTVGGLLWDYAAGRTVGMLALELLLLCFGVSVLVQLYLQVNPGNFAAVSTVTALLVLSMDWLFFYYMPGYAGAALRYIAFVLPSAVLTIPAALLAFWLVQRIHDGFGIDNGVVMKDFFDTWKFKILVAVAVFLVGIMAYAGANGRLTAAPQELLGVILTPFQKAAAVVSGGVGAVWEKYTSIDEVMEQNEQLEAENAELRQQMVDYDRIKAENDAYKALANIQKKNSNATYVSGFVIGRDPLDEFGGFTLDKGTADGVAVNDAVISDRGYLLGMVVEADPTSCKVMTILHPSFNAAGVVSRTRENGILNGNTTYAADGLCTLTNLERSTETRAGDQIITTGLGGVFPPDLLVGTVQDVVPEASGKSSIAVVRPGADPRTAKHVFIITAYMSFLSKDVGIDLGTANTLVYMKGKGIIMREPSVVAVDTKTDEVRCVGGEAKAVIGRTPGSIVAVRPLKDGVIADFDITANMLENFLKKACGNSMFSRPRVVICIPSGVTEVERRAVREATLKAGARQVSVIEEPMAAAIGAGLPISEPTGSMIVDIGGGTAEIAVISLGGIVASRSVRMAGDMFDQAIIAFIKRKYNLLIGERTAEQIKIEIGSAYALDPELTMEIKGRNLVDGLPKNIVVHSEDVRGALLECLVKITTAIKETLERTPPELSADIIDRGITLTGGGALLRGLDQLIQSETGIDVHIAEDPLDCVAKGAGAVLDHVDVLHDVLDTDGGHMMNHLILASGSPRRRELLSLYTTDFTVCVSDFDESAVTAPTPAQLVEQLAIGKCLAVAKQHPDAVVIGCDTVVDVDGAVFGKPHDAEDAKRMLRALSGKTHQVHTGVCIAKGDRAEHFVDSCKVTFFPLGEEEIAFYTATPEPYDKAGAYAIQGRAALWLDRIEGDYYTIMGLPVSRTVQTLAHFLMEPITVKYKVLDARAKVPAYATPGAAAADLCAVLDAPLTVAPMQRVLVPTGLAIELPGAHSVALVYARSGLSIKHGLCMANGVGVVDSDYRGELKVPMVNLGAEAYTIQPGERVAQLCIAPVYTAAFVPAEELGDTQRGVGGFGSTGKMARIEILAPVGSEEMLRAAVFSGADAVYLGFSGFNARTGAGNFDADSLQEAVRFCHARGVAVHVALNTTVYGTELPALEQAIRAVAASGADAVICQDLAVATLIGKIAPQLPRHGSTQMSVHTLQGALELKELGFTRVVLARELSLPEVEHITKHCGIETECFIHGALCMSVSGQCYMSAFLGGRSGNRGSCAGPCRLPFEANALPEGKPGRLHHLSLKDNSAIDKLDKLQALGVASAKIEGRLRTPEYVAAAVSACLAGREGRAYDRDLLKNAFSRSGFTSGYLDGKIDGTMFGVRSEADAELTKKTLPMLRELYRRERSRVPVQMKLEIEEGGEKLTVTDADGNKAFAYGDAEPQPARTDPTESLNRSLTKTGGTPFTAEKITVEMDGGPWFIPGSAVNELRREALDALLKKREVLRPWPTTEEHVAALPQRTLPPRRTLRVRFERWEQVPERALDGVEYLILPIAQADRVPREWRAKTLLELPRVMFGALEQDTARRIAATQDAGFAGYEVSNIAHLRLCRGLPMTGGFGLNITNNVAAQFYAEQGLSSLLILPEVKDSDIASIAPTRNGKPVPTGVMIYGHMPLMLTRACPLQNIHDCAHCDKTGVLTDRKAKKFPVRCGLGVRTIYNPVPIYMGDKPGALAVDYGVAYFTLESREEAAQILDSIRTHAPFEGDFTRGLYFKGTNMVNKVRVNIAGTPYAIATTDSEKYILGLAKKLDEDITKLLDTNDNLSVTKAAVFCAMDYLDEYRKSTGSAENMRSQIQDYIADAARAKLAEDKALAENAVLRREAAALREQLAKERQRETRREERAARAAAETAQEQPAPEAPAADSAQTDETNMTSKEFGKILQDKLTSEYGVELNVASNQQIYRSLALICRQMMSENHKKFQSKAIGTGTKQVYYLCMEFLMGRSLKMSLFNLGLDEVAKKALADADINLDSIFEEEPDAGLGNGGLGRLAACYLDGMATTDICGTGYSILYEYGIFKQKIVDGWQQERADNWLPGGQVWLKSHPDQAVEIRFDGEIHENWDNGFHYIQHTNYNSVMAIPSDMYVQGYDGKGVAKLRLWQAKAPDFDMSSFSLGNYNTAMSKNANAELISKVLYPNDNHVEGKILRLRQQYFLSAASIGDIVQNHLSSYATLENLPDKVAIQLNDTHPTLAIPEMMRILLDECGFDWDKAFSICQKVFSYTNHTVMAEALEKWNVDIFKMTLPRIYQIVVEMDRRAREELAKAFPGDQGKIDYMALIGDNQVRMANICAYTANSINGVSKLHSEIIKESVFHDYYLFKPNAFKNVTNGIAYRRWLLASNPGLCKLLDETIGDGYKHDASDLTKLNKYADDKTVLKKLNEIKLANKKDFASYLAKSTGQVIDPNSIFDCQVKRMHEYKRQHLNALNIAAQYLYLKENPNADFIPKTYIFGAKAAPGYYMAKQMIRMICKLGDLINNDPAVRDKLRVVYLEEYCVSLSEHLMPAAEVSEQISLAGTEASGTGNMKFMLNGAITLGTLDGANVEIADAAGKENELIFGMLTPEVNNLKRVGYHPNAFIMGDDVANSALNFLERGWNGENFHEVTENLRSSDPYMVMADFKDYRRAQADLQKLYADRETWARMSLKNIANSGIFSADRAVLDYARDIWYASPVPMGKMSCLFNSYDPYFKQPFGAVRAGQTVHLSLCIPEELGYVDPHLVLQKEGKYDVPVHYRMKFDGQTPHQNHFSVDVVLGDPGLYFYYFDLYTDFRRIVRGADNCGVVSWQEGESWQITAYEPDFQTPECIKGKVFYQIFPDRFCEGIENKPMPFPDRLYQADKHAEPFWQPNGTGGHLNEDYFGGDLEGIRIKLPYLREMGVDYLYLNPIFEAHSNHRYNTADYLNVDPLLGTNEEFEVLCREAAKYGIGIVLDGVFSHTGSDSRYFNREGRYGEGGAYRDPNSPYRSWYDFDPKYKGGYRSWWGFETLPEVNEETPSFVEFITGEGGVIDTWLRRGAAGFRLDVADELPDAFIEKIRTAVKRVSPEKFLLGEVWEDATTKFGFDHRRTYLLGKGLDSVMNYPFKNSVLDFVKGKPAQQAANEILSICEHYPAPAINTALNFLSTHDTERALTVIADEPANGRGREWQSGRSVTGEAYEEGMLRLRMAYAIIYTLPGVPCLYYGDEIGMQGYRDPFNRAFFCWDSHEERLRPVLAQLAQLRHSCEAFRTGELRVLRAEDGILHYQRIGKTETAEIIVNRSEHIIVEPLASGKHTEVNPMGFTIVVEENGHNPNHSYYDIQMLPPYAAIIRHPLGGRSRAFYWNVAQKTKYRQKWEKSPMQISPILWLAAAVGFLALEASTFNMTSIWFAIGSAAALLCCVFTGSFRVQAVVFLVVSILCLAAFRPLAAKLRLKHTATNGDRNLGREAIVLSPVTAEVPGRVRLDGVDWNARCATPGDTLTPGALCRVTEIHSTLLIVEPVLTESRNPHTTTMVLFFVILALVFVLVLVIVSNIVIVPQSKVYVIERLGSYSDTWTAGLHVKIPFIERIAKKVSLKEQVADFPPQPVITRDNVTMQIDTVVFFQVMDAKLYTYGVNQPIAAIESLSATTLRNIIGEMELDHTLTSRDVINGKITAILDEATDKWGIKVNRVEVKNIIPPREIQEAMEKQMKAEREKRAVILKADGEKQAAITAAEGEKESAILRADAVKQQRILEAEGEAQAILAVQKANADAIRLLNEAMPSDKVLAIRSLEALAKVANGKATKIIIPSELQNLGGVVPSIKELMTDPKDAEMFFGFQLTLGLMMAFYGFSVMKNPRVWGDQGRRAVKAENFEEYCRQNGQFFLKAGCVVAVIGALDALITLDALLYALLYIFGLAFAFYPLTRWCKQNEGFSWPWPHVQSEKKRIKELRREQQAQENEEKGEKMEKKPFLTEAMAQQIIEDVPTPFHVYDEKGIRENVRRINKAFSWNKGFKEYFAVKALPNPVILQILKEEGCGVDCSSLTELMLSEACGFTGHEIMFSSNQTPVEDMQKAYELGAYINLDDATMVEFLERVAGVPQEIFCRYNPGGTFQLGESEEGFQVMDKPGDAKYGMTEQQMIDSYKKLMQKGAKQFGIHAFLASNTISDAYYPELAGILFQLAVRVQQATGAHISYINLSGGVGIPYRPEQTENDIMAIGEGVRKKFEEILVPAGMGDVAIFSEMGRFTTGPYGALVSTVIHEKHIYKEYIGLDACAANLMRPAMYGAYHHITVLGKENEPCDHKYDVVGGLCENNDKFAVDRMLPKIDIGDILYIHDTGAHGSAMGYNYNGKLHCAEVLLCEDGSHRLIRRAQTPRDYFATLDFLPFMKPLFEDMKDKTKNTPQVLLRRALLVLLDAAIVAFSFYFALLLRADGAVEAGWWPHNRALLYENLPWIVAVYIVCFLAGGLYSVLWKYAGERDLIRLAGMIAVPTAVVYVVNRRFIHGVLFNSANCMASVLIFLFIGGSRLAWRLFLNHPLGERMRKVPAKDPNRPVLIVGAGEAGAWAINVCKSNKEYGHAVVAVDDDPAKLNQTIHGVPVKGTLEDIPELCTRYGIHSIIIAIPTLKGSKLSHVIDLCVSTHCAVQLLSDPQLVGSGAPQQEVFRELNPADFLSREEVTLDTDKISGYLTGKTVLVTGGGGSIGSELCRQVMRFKPGKLLIFDIYENCAYELQMELQQKYGRDIPVTVLIGSIRDKKRLDEVFDTYHPTVVFHAAAHKHVPLMEVSPAEAVKNNVLGTKNLLVSASEHGVERFVQLSTDKAVNPTSVMGCTKRICEMLIQTFAGNTDMKCVAVRFGNVLGSHGSVIPLFEAQIKKGGPVTLTDPNIVRYFMTIPEAAQLVLQAGALAESGNIYVLDMGEPVRIMDLAKQLIRFYGYEPGVNMEIKIVGLRPGEKLYEELMMDEEQDKMRRTQHNKIFVASPRTIDLAEFYEQLQALEAAAAHNDEGVVRQLAAMIPTFTPTRENLKLMRQSYFKNAALLTGSDVVLRLAGMGLRIWLANALGGAGMGLYQLVLAVYGLFVTLATAGISVAAARLLTEELSRDKAAARGMLVRLVLAGLTLGGLAMVAQLATAGLAAKWWLGDVRAAAALRTSALGLPWMAVSAVLRGFFLARRRVEPNVLSQLAEQTVRIAAVVWALSRTQGWPDGSRCALVLAATALSEAVSTALMALFYRREAARCFGSTAPRPPREASRRLWDILWPVEGGRVLSSALHTAENMLVPACLAVYLGASGGRTAALEQYGTLKGMALPLLNFPFGLLGSLAVLLMPEITQAHIEGQTARLNALLDRMLRLTGYFSMLAGTLFWVWGRPLAQLLYHSPEAGFYLETLAPAMPLMYLESMVDGAMKGIGEQKAAFRYSVWDAVLRIGGVAVLLPRYGMRGFLTVILLSSFYTCAANTGRLLLSSGTGHAFRRWLGAPLLAAAAAGAAGRGVRRALTGFPAQGLPGQLAVLTAGGTVTAIVFLLAALPLGLWEELRAVLRQAKTGKNRGKMSEECTHDCSNCSAACSSRDAAPQHDAPNPNSSVKKVIGVVSGKGGVGKSMTSALLACAMARRGYHCGILDADITGPSIPKLFGIHGRAMADDKGCWPIQSRMGIDVMSINLLVENEEDPVVWRGPVIAGAVKQFWTDVVWKDVDFLFVDMPPGTGDVPLTVFQSLPVDGIVVVASPQELVSMIVAKAVNMAEMMKVPMLGIVENMSYIVCPDCGKHINVFGNSHVDEVAAKHHLPVLAKCPIDPKLAELSDAGMIETYGGEFLEGAADACEKLLKKMKKRKCLCPPHSGYILADAGRFRFSMLARHARTSGQCLLYYYKALRWVLQMLTNEYLKRVYEGLEKRNANEPEFLQAVREVLESIQPVVEKHPEYEKAGLIERLVEPERIITFRVPWVDDAGKVQVNRGYRVQFNSAIGPYKGGLRFHPSVNQGILKFLGFEQTFKNSLTTLPMGGGKGGSDFDPHGKSDMEVMRFCQSFMTELYRHIGQFVDCPAGDIGVGGREVGYLFGQYKRLTNSFQGGMLTGKGLTFGGSLARTQATGYGLCYFTAEALKCMRNDSLQGKTVVISGSGNVAIYACEKATQMGAKVVTMSDSNGYVYDPNGIDLAYVKDLKEVRRGRIKEYAETHAGATYVADCTQVWTVPCDIALPCATQNEINKESAEALVKGGCTVVCEGANMPSTPEAIEVYLSNGILYGPAKASNAGGVATSGLEMSQNSERLSWSFEEVDAKLKGIMEGIFHASYDASVAAGSEGNLMVGANCAGFLKVATAMMAQGITYMDEQMFCFQCEQAAGCTACTGAAGVCGKSAETAAAQDRLTGALIAFAGQLIAAGRGPAPEQARLLMQGLFTTITNVNFDPAAVDALTRRVHDASPGTGPDYDMQALWREPDADRRSLKCFVLFSLRGMAAYNYHARVLGRIDPELDRFFCTALQAVGDPGQTTDALWQLVQATGEASYRCMELLDAANTGAFGDPEPVQVPLTIEKGPFIVISGHDLYDAQQLLEQTAGRGVNVYTHSEMLPAHGYPELKRRYPHLKGNFGTAWQNQQREFEDIPAPILFTTNCIMPLRASYADRVFTTSVVAYPGVPHIDEGRDFSPVIEKALELGGYAQDTLLPGLNGGSTVTTGFARTAVLQHADEIVQAVRDGKLRHFFLVGGCDGTRPSRRYYTEFARLTPPDTILLTLACGKFRLNDLPLGTVPGTGLPRILDVGQCNDAYSAIRIALALADAFGCGVNDLPLSLVLCWFEQKAVCILIALLALGIRNIRLGPTLPPFLSPGVVRTLQERYGLKPIATPEADLQAILGGMENFTEQKTTLGLYDPQFEHDACGIGAVVDIKGRKSHQTVDDALSIVERLEHRAGKDAEGKTGDGVGILLQISHKFFSKVAEELNIRLGNEREYGVGMFFFPQNEHLRAQAMKLFEVVTRKEGLEFLAWREVPVDPDAVGQKARDCMPAIWQCFIKKPAKVSKGIEFDRRLYIVRRVFEQASNGTYVPSLSSRTIVYKGMFLVHDLRRFYADLQDPDYESAIGMVHSRFSTNTNPSWMRAHPNRFILHNGEINTIKGNTDAMLAREESISSPILQDDMNKILPIINTSGSDSAMLDNTLEFMVMNGMDLPLAVMITIPEPWENNKNISQKKRDFYQYYATMLEPWDGPAAILFSDGDVMGAVLDRNGLRPSRYYITKDGRMILSSEVGVLECDPENILVKERLRPGKMLLVDTVKGEVVDDEKLKELYASREPYGEWIDRNLVQLSGLKIPNVKVESYTGEQLTRLQKVFGYKYEDVNTMILAMARAGAEPSGAMGTDTPLAVLSSQHPPLFNYFKQRFAQVTNPPIDAIREKVVTSTSVYIGAHGNLLEDKPENCKVLKVHNPILTNTDLLKIKYMNVPGFKVATVSINYYKNTSLEKAIDRVFLEVDRAYKEGANIIILSDRDVDEYHVTIPSLLAVSAVSQYLIRTKKSTALALILESAEPREVHHFATLLGYGACAINPYLAHETIGQLIDEGLLDKDYYAAVQDYDNAILNGIVKIASKMGISTIQSYQSSQIFEAVGISKEVIDKYFTGTVSRVGGISMADIQADVEALHNAAFDPLGLDINMELADSGAHKFRSGKEEHLFNPQTIHLFQKACRTGDYATFKQFTQTVDNMGAEGVHLRSLLDFNYAADGGIPLEEVEPVSSIVKRFKGAAMSYGALSSEAHETIAIALNRLGGRSNTGEGGEPEERYHSESNSKIKQVASARFGVTSKYLVSAEEIQIKLAQGAKPGEGGNLPGAKVYPWIAKTRHSTTGVGLISPPPHHDIYSIEDLAELIYDLKNANRSANINVKLVSEAGVGTIAAGVAKGGAQVILVSGYDGGTGAAPRTSIKHAGLPWELGIAETHQTLILNGLRTRVRIESDSKLLSGRDVAISCMLGAEEFGFGTTLLMAEGCVMMRVCNLDTCPMGICTQNPELRKNFKGKPEYIINYLTFVAEELREYMAKLGVRTVDELVGRTDLLRVKPAAPGSRAAELDLDCILHNPAIANSNVHFIKEDSYDFHLENTLDMKVLMKKFKLGSKAPQSVSLNVSNVDRAFGAIFGSEITRKYGNDLPDDVYTVHCNGAGGQSFGAFIPNGLTLELVGDCNDYMGKGLSGGKIIVRPPQGIDFKPEENIITGNVALYGATSGKAFISGVAGERFCVRNSGATAVVEGVGDHGCEYMTGGTVVVLGQTGKNFAAGMTGGIAYVLDENWDFYQRVNKETVSLEPVEHKYDVATLKELIRAHVEATGSPRGKEILDNFSAFLPKFKKVLPYDYDRMLRVIASVEERGLDGEQAQIEAFYAVQKHKMGKTTGFMDYARKTSTDVAPLERLENFNEFHIWLSREQQQTQAARCMDCGVPFCQAGMMIGGMASGCPLNNLIPEWNDLVYHGKWELALHRLMATNRFPEFTSRVCPALCEAACTCGDVTGSSVTVRENEHAIIETAYAKNWLTATPPPTRTGKSVAVVGSGPAGLSVAEYLNKRGHAVTVFERADRVGGLLMYGIPNMKLDKAVIERRVKLMQAEGVVFRTGMDVGGAVPAEQLLADFDAVVLCCGAKKPRDLNVPGRDAKGVHFAVDYLTSVTKSLLDSGFADGKAINAAGKNVLVIGGGDTGNDCQGTALRQGCTDLMALEMMPQPPAERTAANPWPEWPRVLKVDYGQTECIAKFGKDPRVYQTTVKEFLKDEAGNLTGAVISCLKPERDPETGRTSMVPTGKEFTYDCQLAFIAAGFTGCENYTADAFGVELTARGNVADHSFKTNVDKVFVCGDMRRGQSLVVWGLREGRDCAAEVDRCLMGYSNLMEQKRLCPFCMGELPPAATVCPHCGKILEGCNPAGCLPVGTVLAGRYTVGEMRSLDGEGVLYSGVENLGAFRVTIKEYLPVTLSAERGADCILRPKQGSEVLFKTTRMDFADLYRAVQRITPASGLEAVLDVVEANNTVYAVLENLGGTPLEQWLENRPAPVQAEDACAMLRPVFEGVAAMHKAGLVHRGICPENIRVMSDGRCRLAGYATVGLRTAGSGLHEQLYEGYSAPEQYTTAEFEGRYTDEYSLAAVFYRMVCGQAPMPAAQRVVSDSNPRARTVEPAVPAYVSDVLQLGLRLKVMERIQTVPQLYQALSSKEYTAELTRTMKPETPMHPVRAEQSAQSREHLLSLKGLLAGILILLSVLILLTLWGIVSSKEEQTPSSEPSSEAASSEEMKPQNLVPNFVGIDYEQIKNNREYTSMYLFRAVLEYSDTVPSGQVIRQEPEAGEVMENGEVIQIVVSQGPEKVEMPKIIGASQDKAIEILSSRGLVASCFMVVNDGSYATGCVVSASEEEGAMVTVGTVITVYIAADPSVQITTTPEEPAATEPTTPETPPEGSTEPEYDTNMTVQTLAIIVLLVSFFVMIFLRFPIAYAVGLSSVLCMLVQGQALTDVCRLMVKGISSFSLMAVPFFITMGVLMGSGGISEKLIALADACVGWMRGGMAMVNIVASYFFGGISGSASADTASIGSIMIPMMVDQGYGADFSTAVTITSSCEGLLVPPSHNMVIYATTAGGISVGSLFLAGYLPGALLAIVLMIGSYIISVKRNYPKGDPFSIKAFVKQLGTSIWALAAVIIVVFGVVGGVFTATESAAIAVIYSLLVSVFVYKGLDWKGVWHALDECVNTLSIVLILIATSAVFGNCLTMLHVPDLAATAITDLTDNPYIIALLIDLILLVLGMIMDMAPIILIATPILLPIATSIGIDPIQFGIIVVLNCGIGLLTPPVGSVLFIGSAVAKRPMEKVVKATLPFYLCMFIALLLLTYIPDISLAIPKLLGGYVSPIANPLGPVFIHMPKIFTTLDKIRPAYDFTYKVVLFICKILLIADILITTMSVIGRYVPFIPDPSWSEEVVLTCMSYMAVLSAALAIRRGAHIRMTAFDMYLPKKVVKALDILSDVAVMILGVVMMAVGWNYATTLGGRGFYVSMPWLSRFWMYFPVPLAGVAMIIFEIESLYNHIKSFFVKEEMMKMISRRSFMAVAGAATAAVALTACGGSKSGSTSTAASTSTAASASAAAGDAAAAANDPKVTLVYAEVNPLDTIVGQTGSHFKEKVEELSGGSVVVDVQASGVLGSENDVLDAILGGSTSIDISRISAFALTSYGCNKSKLLSIPFTFNNRAHFWNFANSDLAPEFLNEPQELGLPVRGLFYGEEGFRHFFTVKPVATIDDLKGMKLRVSNDPVMNGMVEGLGANPTVVAFGELYSALQTGVVDGAEQPIANYKSNAFPEVANNLILDGHTLGAVQAVITDNAWGKLTANQQAAVMAAAADTQKFNADLSETAENKVLEELRSSGCNVVDVDDKTPWQEACAKVIKDNTSDQAELYQKLLDMKAMTRRQLLRLLAAAPALAVTGCTAQSASSQQEKPLILRYAENQPEDYPTSKAAKAFAELVAQRTGGRVKVLVYSGAELGAEQSVIQQMQFGGVDFSRVSLSQLAEYEPELSVLQLPYLYSDAQQMWRVLDGDIGDEFLAMLDGMDLVGLSWFDAGVRSFYTREKVTGLDDLQGLTIRVQESDMMSDMITALGAKPAQVVYSKVYAALHNAEIDGAENNWPSYEVMGHYEVAPFFLKDEHTRVPEVQLASPAVMEKLAALDESFPEVIRACARESAQTERELWARREANAEQNMRKRGICVTELDEAEKARFRAAVQPMYDGFSAQQELIDRIQKSMIRLLIADDERMEREALADIVMRRFEHEVTVEMAENGRKAADTAVLWEADLILMDIEMPGMNGLDAARAVLEQRPECKVIFITAYSLFQYAHEAVHLGACDYLLKPVDPDETEAAIRRAIRQIEAGRRLAELAAEAPEPETAPEQETEPAGEGESDRNALVMDHVRKYMEDNYMADLSLDSVSEILHISPAYLSAQFKKYQKMNFLDCLTELRINAAKELLADPFRSAAEVASMVGYEDASYFARAFKKRTGMTPTQYRKEAAKAAREVRLMEKRNWKHIVTLKQRMVLCLAAFFAAFALQLALNGYQARAVQQVQDDQMGNFNAISRFQGGVESSISILEAYRWENGETEEMLEKLQAACSTSNAWLWRIRSNMDGLQNVSDEQWVLYGAVETTYGSYNTLLEELESYLSSGQEAKASQLYYNKVSVCGGYLSQYTMQLLKTSILDAQTTYTEISELGERIALMQIVVVALCVALGCASGLMVMQLLTPVSQMIEASRAISRSQFDTPDIPLPKQPEIGQLAESFNRMKHSMAQQVSTLQEKNEIERELHRQKTEALELQNRMERSRLQQLRSQIDPHFLFNTLNVIQQMAGTESAYRTQALIMALSHLLRYSLMSNDEQVPLSREVRVVDEYYSIYHVRFGDRVQMEWAFSDSLDLTETMVPSFILQPIVENAFKHGICPKEEGGVVRIRMIPLREKGLLCIRVLDNGVGIEPEQLQQLRTALEQPAPRWEHIGIYNVAARLRLLDARCRVVVRSRPGRGTAVILYLPLVENEEEFEEMTQNVCVSVQMDEKGFHDFASFDLLRHNKGWQRPAVFTAILLVCAGICLSQIGKREGAGLLTAVLAIVAIGLPAVYFGTFFANLSKQIKKLGLPRPFYRLELDAAGLSVWMAGEQNKTEPTNRYTWNTVYCAYRTKEAVYIYVQKNQAYLLNESMDAAWSLLGSALPAASLHDCRKMKSRSVCGRSGILFLHNNFHKTKTHAAAKQKRSVGHGNSVIKFMKLSDIKNGNLSAEWAEKGYELPKFDIEAVKAKTHAEPTWVHFGAGNIFRAFPAAVLNDALNSGKYDRGVIVAESFDYEIIDKAYQPYDNLSLLVCLKSTGEIEKKVIASVTESLKADYSFGADWARLVEIFQNPSLQMISFTITEKGYGVAPADLERGLTPVLAMGKVTALLYERFKAGKLPLTVQSMDNCSHNGDKVKTAVHAYAAKWVEQGLVPAEFLAYVQDETKITFPWSMIDKITPRPDAKVQEMLAKDGFEDNYTIVTEKHTFTAPFVNAEETQYLCIEDHYTNGRPPLELGGVLYCDRETVDKIEKMKVCTCLNPLHTAMSIYGCMLGYNLISAEMADEDLRSFIQKIGYIEAMPVVVDPGVLNPYEFIGAVINRRLPNPFMPDAPQRIATDTSQKLAIRFGETIKAYEERGLDKSNLVLIPLVLAGYARYLKGIDDNGQPFEISPDPLLAELQAIVNPLEVKEGEQDFSCLKALYSRADVFGVDLYAIGLGEKIEGMVKELYAGNGAVRKTLHKYTLARMPMKMGWRWYGEGNDPVTLSDIKQIPGVTSIVWALHNKMPGEIWEIDEIQKVADQIHAYGFDMDVVESVNVHDDIKIGLPTRDQYIENYKQCIRNLSKFGVKVICYNFMPIFDWTRTDLFHPVGDGSTALFYEKDKIKGDYKAMAEYIMSFTEKYNMTFPGWEPERMAKLDELFKAYAPVTKEKLWENLKYFLEALMPTCHECDIKMAIHMDDPPWDIFGLPRLLVDEPSIDRFLKMVDDPYNCLTLCTGSLNANPNNNCAEIIRKHCDRIAFGHVRNIHHFPNGDFSEAAHRDCCGETGIIEVMRAYHDCGFEGYIRPDHGRQLWEEGPGVCRPGYGKYDRALGIQYMLGIWDLLDRLDEEKKGMRKPVKKLHQPEEQEKIGRRAAHCPKTLLKNWHFAVFVMDESNFVVKTIFHARGSSEVLTENYFATRKEAEEFCALTDYAMKLNYGAEQQLVTTEIVALMVSPAKCIAGRSVADWIAAYPVVSDLCALKETAWVNPDKLPFAQAVAACPLTLADIEDAAARLERFAPYLAAVFPETAAAGGIIESPVQPIPRMQKVLEERSGTHIAGQVWIKLDSHLPISGSIKARGGIYEVLKTAEDIALHSGMLHFTDNYAVLAEERFRKLFSQYSIAVGSTGNLGLSIGIMSAKLGFQVTVHMSADARQWKKDLLRSRGVKVVEYASDYSIAVTEGRKLAAGDPYCHFVDDENSKTLFLGYAVAALRLKKQLDAQGVTVDAEHPLFAYLPCGVGGGPGGVAFGLKLLFGDAAHCFFAEPTHSPCMMLGMATGENNSICVQDFGIDNRTAADGLAVGRASGFVGGLMRPFMSGCYTLQDERMYTLLAQLADAEELFLEPSALAGMYGPVLTQPGQLLGAYTETALPAGALANATHLVWATGGNMVPREEMQRYYAKGKALAQGMTTTNITNFRKNAFDYVEQTIKYNQPINITTKDGNAVLLSEEDYSGIMETLYLVSAPGMREKIMDGIATPLEDCVDETAVEWMYKVVYTKTAAKDVPKLRSAHLDEKAKALIEIIRVDPFQNPPPYEKLVGDLNGAYSRRINIQHRLVYQVYEKEQTVKILSLWTHYERMSGHSKWNNIKRKKEKTDGARAKVFTKIGREISVAVRDGGPNPASNSKLADLIAKAKRMSVPNDNIQRIIKKAEGGDKTEFEAITYEGYGPGGVAVMVETLTDNRNRTAADLRHYFDKNGGNLGAMGCVAFLFNQKGVIDISLEDKDADEAMMDALDAGAEDFDASEDAAEVTTDPENYSAVVKALEEKGYEILSDDLAMVPMTTTRLTDPDQLKQMGKLLDSLEDNDDVQNVWHSLENEEDLPEMPTEYFEQRERALLGQRYEQLYAAPQQTAERGVTVSALRTTPEQFAQRADFPLEPSPFCKAAFVVHQPDFKPGRHPYHHAGVFYSQEPSASSAAPLLGVQPGMRVLDLCAAPGGKSSQLAAALQGRGMLVSNEYVAARAEILKSNLERMGVSNAVVLNETPARIAEALPEFFDRVLVDAPCSGEGMFRKEPVALQQHCEALVKQCAELGAQILDCAAAALAPGGQLVYSTCTFAPEEDEGQVAAFLQRHPEFALADVLGNVDYTFGSAGEENRTGGLPLDVSKVRRIWPCQGGEGHFMARLVKAGTPRTLPPEGEYTPEEQLWLAAAAEAGKKGKGKAKPAKAADARSARRADSRACRDAVQGTSRRTRDTGAGEATPAQSLAAWQEFARQYFPALAQRPAVVHGGGVLLPVAFPQTGLHVLRAGVFVGSVQKGRFVPEHHLFTAFGSLCTNCEQLTLADCRCTEYLSGREVEARTAADGWCCVTVDGWPLGGGKVSGGRVKNHYPKALRLLMENRSENRSTNCKNQTSNRTSSKTTNSATNEHKHPNQYTKGADDESAKNSTNSRSTNAKNSRMNESEKIDPRELSPLALAFVGDSVLELLVRQRLVEHHRLSAGKLNAEKVKYVSAKAQFREEQLLEPLFTEDELAVFKRGRNASKASVAKHASPEEYRASTGFECLLGWLYLNGQLERVHQLFEVLWQQFDPDQKMAAQTNFIDIATIWLHAGKGGDGAVSFHREKFVAAGGPDGGDGGRGGDIIFVADDHLSTLMDFRYKRKYAAPEGGKGGASLCHGKNAENLVIKVPLGTVIKDAESGLVIADLSDHTPVTIAKGGRGGYGNAHFATPTRQIPKFAKPGMPGEDLQVTLELKLIADVGLIGFPNVGKSTLISTISAAKPKIANYHFTTLVPTLGVVSVGEGASFVCADIPGLIEGASEGVGLGHDFLRHVERCRLLLHVVDVSGSECRDPIEDFEKINEELAKFSPVLAERPQIVVGNKCDLATEEQIETFRQYVEGKGLTFVAISAATMQGVKQLPGLVYNRLKDIPQVPVFTPEYKKQEPKKNGRDFTIQRMEAHVWSVDAPWLEYILAGSNVDDYESLQFFQRQLGESGILDALVQKGVEENDTILIGDYQFDYIFMAHKKGVGSTKNGRDSAAQRLGTKRADGQFVLAGNILVRQRGTHIMPGENVGKGSDDTLFALVDGTVRFERVGKSGKKCSVKQMYAIIVTGGKQYRVEQGDIVYIEKLDVEADSEVKFDQVLAIGEEGSVKVGAPVVEGATVSAKVIKNGKGKKLNIITYRAKKHSARRMGHRQPYTKVEITAINGMTNLVQFPGLGLSFHLNRVAFTIGGVSIYWYGVCIAVGLCLALGFAFRHSLEFGVDPDSMVDVILIGVVLGIISARAYYVAMAPFKYESIWEMIAIRDGGLAIYGGIIGGFLFGGLACKWRGVPVLPMFDLTAMGFLLGQGCGRWGNFFNQEAFGCNTTLPWGMYSEATRAYLMSSTVTVPKGVVIDPNLPVHPTFLYESIWCFVGFFLLFRYIKKRKFNGDITLRYLIWYGAGRFWIEGLRTDSLMLVPSIGLRASQLVAGIAVVAGIAAEVYFTRKLKDKPLFVPLALNAENKAAQKKLDGPIAFAGKDTQLLASSPRKLFLEKTEAYNAQVKAAIEQAGQKKAMPQNNQTLLEKTVADQWQTLPSGLTVLVRPMPGYSSTHVIYATKFGSIDRDFCLNGQTVHLPAGVAHFLEHKMFEDEDGDAFAKYAKTGANANAFTSFDRTCYLFTATQQLDESLDVLLGMVGHPYFTEQTIAKEQGIIGQEIKMYDDSPDWRLITGLFECLYHSHPIRSDIAGTVESIAEITPAMLYDSCKAFYAPGNMVLAAAGNTTMEQILAACKRHGLMEPRPAQKVQRLWATEPMTLAATEKTLTMPVSKPCFGVGFKEEPLSADDLRTEALYDLVLSCIVGGMSPLYRRLYDEGLVNPGFGGEVLRVDGCCCILFTGESDVPDTVRQLLLDEIAQVRAAGVDREVFTLCKNEKYGQLIENLENVEDSASQMADFALSGQTVAQQISMLAGLTAEDADAALQHILCTDRMATMYILPDGTAQAAEEDEEEEEMERTLIAPGVHLSCDPASKFNRCRISIHFAFPAQRKTATAHALLPLVMERGYADCPDMTRLTKKLAKLYGADLTVDARPMGCNHNLCVSVTGIKDAFALEGEALTAEYTKIALGAAFHPYLVDGCFDPQAVSIEKQMLKKGLEDEINDKRIYCLHQANREFFGDSPAGVRQEGYLEEVDGLTPAMLTAAYQQMLRTANIELLVLGCDAAQTAAIRDALLAELACIDRAPLPLVENMAMPTIAPVHKTENYDMVQAKLCMLFTLGQPMQPQQLAAVRLAMALYGGSVTSRLFLNVRERDHLCYYCSSSFQSFTGSMAVNSGVEHADAARAEQAILKELADLCAGPITDEEFEDCRRGLLSGMNGVEDSLGGIESWYYIEVLRAGANSAAPIQSPEQARNALRAVTKDEVRDILRRLTLSVSYLLTKEDAAHAAEMSEPTRTSRAPAEKRLTYQQWKRRKMLRLARNWVLFLAGCAAVVALLTGGILWLLPKVHGLLAGPKVFAASVYDGTDYVFNAADARLILVNANLPYTAEPAPLLDTADEATGQQLEAEAAMQYRSMAAAAQADGVSLTLVAGYQDADTRQAAYEARVQTYRDKRKSEEEAARLAATIQPAANANEHGTGYAADILSADNPQQDTRFAETRAYEWLTAYAAEYGFILRYPQDRQAATGIVFEPWHWRYVGVENALAIRASGLSLEEFIALQRADMRRTDSNYIIHPFAICVNAAVCKKIMTRPPPGREQTGHNMALIVQKFGGSSVKDRDRIFNVARIVANTHNAGNDVVVVVSAQGDTTDDLIAKAGEITHNPSAREMDMLLASGEQISIALLAMALNELGCHAISLTGWQAGFRTDRAYTKARITRLETERISSELERNRVVVVAGFQGLNKLDDITTLGRGGSDTSAVAIAAALHADRCQIYTDVEGVYTADPRKVSNTRKLEEITFDEMLELASLGAQVLNNRSVELAKKYNVELEVLSSLNPIPGTVVKEVTKDMEGMLIKGVAKDTDVAVITILNVPDEPGMSFRIFGLLAQKNINVDIILQSTGRDGKKDISFTCSEGEAELAMRVLKESAHFNDVSVDTTCAKVSIVGAGMQSHSGVASKMFEAMSNNNINIKMISTSEIKISCIIDRADADKAVGAIHDMLFDMKIKVSVPATSANVGSGFDALGLAVTLYNTVTFEDSEVLEISASDGTRIPRGESNLVYRSAKGLFEKVGKQIPPLKITQTNPIPMARGLGSSSACIIAGLLGANRMLGDVLNTQELLTLATAIEGHPDNVAPALLGGLTSSVFEDGKVYSVKRNVDESLCFAAIVPDYKLLTEAARAALPKEVSHKDAVYNLSRAALVPAAFCEGRHDLLAIATEDKLHQQYRMPLMPGSREVFDMARLCGAKAVYVSGAGSTVMAVAEKAEAEKFYSKLEKGLELLEGLDGCEAFTLLQLDADNTGATVEMAKIAILGFGTVGSGVYEVLCHNAASVSRRAGEPVEVKYILDPKDFTGNPVEPLVVKNIDVILQDPEIRVVVETIGGTRFAYPYVKACLESGRSVCTSNKEMVATYGAELLALAKEHDCAFLFEASVGGGTPIITPMHQCLAANVITEVEGIVNGTTNFMLTKMVREGLGFEDALQIAQELGYAETKDPSDDVDGRDACRKIAILSSMVCGHQIYPQNIPTRGIRAITAADVASAEKLGCVIKLIAWMKLGKDGSVAAGVEPCLVPKANQLASVDDVFNAVLVKGDMLGDVVFYGKGAGKLPTASAVVADVVDALKNGAQVHDSLFWQPADPVDGMLTDPAPAAYYVRVAGIAPAVVEAIYGYGKVVDERYEGCAYFVKRADERALAEAARKVEAVGGSVKLVLKRLPEEVMERRFYLVDAQVLPEVFLKVVRAKELLASGEARSISAATRAVELSRSAFYKYKDCIFDSENGREVITVMATLRDETGALQSLLAGISAAGASIVTINQSTPENGAALVAVTIRTDTMQMSPEELTEKLSRQRMVVSVRCGYNLMQLCPATVLKCQEAIPISNNEMRKIHRGGEEQPARPVGRKVNVSQSRREARPAAENRTRAPKAPKSPKPPKEKSKHPILRFIGRTVATVLCLGIMLGSVVAVGMVFYVVQATANDGDLLDLDNIQLSQSSMVVATDPDTGAQVEYATLRSSNSHRVWADLEQIPSNLQYAFICTEDKDFYSEPGVNFKRTIGAMINEYLLPIYSSKQGASTLEQQLIKNLTDDNSASGIDGALRKVREIYRALCLSRSYSKETILEAYLNTISFTGTIQGVQTAANEYFNKDVSQLSLWECATIASITKNPTNYNPYTNPENLIHRRNFIMYNMWQQGVISEEDYRNGAAQPLVLAEEDSGKKPSTVTSYFTDALFNEVVQDIMTKEGISESEAQKLLYTGGFTIEATVNTKLQSQMENLMLNTDDAYFPAGWHEEEVTSISDDDVQVFNEDGTPKTRTGEDGTVYYYRNVRTQAAMVTLDYDGNVLAIAGGLGEKTKSLALNRAYNVERQTGSTIKPIGAYALGIEYGLVNWSTMLNNSPLYQKQDMIIRDEDYCRKNGLMGLSDKQLRAYPNAWRSWPRNYGGNYGDGSDLPLWNGLARSLNTIAVRVGDLVGASNIFNFVYNTLQLNTLDPTNDVGLAQMVMGSQTKGVTPMALAAAFQIFYDGEYTTPHLYTRVLDRDGNIYLENNATSYQALTPDTAYVMNRLLKNVLFSSVGTASGRYPNSNGMEAFGKTGTASDEKDLWFVGGTPYYVTAVWWGYDAPYDMTKTLSKQQAKTRTCVMAWKALMEQAQADLPYKAFPTSAGVVERRYCTQSGLLAGAGCPSTAVGYYRADDLPDTCTYSHAAPQAAAPAENTDDAAPTQPVIPTDTSALDTEMLYYLYLLSAQRLVLARLGLACYNMVLQFEISCHKRCGMRKLSVCLFYGLCVFTIVFSLFWMALPRLPLSQSPAGSETDPASPLSLAAQAVPQTDTARYCLQDSGGRVAVYTCRADGTPGTLIRVTGIYSNLLPENDALRIKRGLVVNSPRELDLLLEDLGEMDITHITSLLGGVALFLYGMSIMGAGLEKLAGGKMQGVLQKLTSSTIKGVIFGTLITGVIQSSAGTVVICVGLVNSGIMTLTQSVGVIMGANIGTTVTGQLIRMADISGDSLWLTLIQPKTFAPVVAFIGCIFYVFLRNAKKKNIGQIMLGFGILFTGMSLMDTGVAPLRESAVFQNLFVTMTNPILGVLVGVVVTVIIQSSSASVGILQALSSTGLVTFSSAIPIILGAHIGTAFTPLLTIGGSSKDGKRAALIHLYFNVIGSVILLALIYAVQFTIGIPMWGDVMNKSSIANIHTLSSVCAMLLFLPCSGVLSRLAMLTVPSSVEEAQELSMPVLDERLYKSPAVALQQAKNAVIKMSRRAARNVGLAAPLLLKMDEETVSAIKVRENLIDRMEVEITNYLIKLTDQELGDDESHAVTELLNFVTEFERIGDYAVNIMEKAEELYDKEASFSESAKKELQLLDAALERILVLTDEAFENDDTQKAAQVEPLEEIIDVMVERLRDQHIRRLKDGICSIDTGVVFLDVLNNAERISDHCSNIAVRMVGMEAGEDYDSHTLKSIMHHNPSKDYMLEYEQCRKEYLVPLEEMEAMKDFELRYVGSHVEVYTGSGVFLFSADTVREAMEELAGMTENGSSSACFLRKCGAAGTAKDLISEENGRVQREQTGEHTLFFTQKIRKNLMKRKIGRLCMVLGAVLILCAAGLLGYNRWDAARAEKASQEVLGELEQTMQKTITEHQQENETAAPQPVLDPTQEMTTVEVEGRDYIGVLSIPAVERELPVMAQWSYAGLKIAPGRYSGTTYGDDLVICGHNYAMHFSPIKWLAIGSSVYFTDADGLRWSYEVESVETLRPTQIEEMTTDTETDNWDLTLFTCTSGGGSRYAVRCVRTGYPVRVTDAAEMEQGFQVLLQVFGGLALFLYGTDSLCRAVQQGAGRRLRSLLARCTANPAAGLLTGAAVTAVLQSSSAVTVMVIAFLAAGLLQLRQAVPVVFGANIGTTVTAQLLAFRVESWRYLLLFGGVLLCLACKGWRGRCVGEAVFGFGLLFEGVTVMRSAMEPLLQSPLLRLELARVQQSPLHGLLAGVCMTLTVQSSSATVALLQSMAAQPGADGVHSLLGLTAAIPILLGDNIGTTITAVLAAIGQGRDAKRVAAAHAIFNLSGAAVCCALLQPFAALVRLCSPAGVECAVIARQIANAHTLFNVLCALVWLPLTGQMVRLVCALLPDKKRPQERLMRIDKTYKFFVNFCLIFSHSLAIRLQKEYAYQALILNICMSEPSTPSFQGMCHYIGQLSKASKTGMRAALADCPKCHFNMLEGLLHAINCHGKDGAIYVSDLAREIRQPLPAVSRGLRLMEQDGTVVREPDPADRRKTLVRITPKGYELCHQCEQALRNYFASVLARLEPEQVAQMDALRGALMDAILAENAARNIDPKGETNHDKDLMTKIFKQLARHWAVCLVVFALLFVQAYCDLALPDYTSKIVDTGIQQGGIESPLPQTVRQSTLDALSLLMSEEDAQKLQNAYQYYLQDDGVLQLRSDLTEDERTALEEAVTTPDIVLYMAAAQAANTPAGQNSMGMTGLAETPSAAADADTETVTPTAADLDTVCSQFAAMSQMPGFDRSMQQKQLDGAMSQLDSTLLENLKSQSLLLVQLEYEAQGVAQDVQMGYLFRVGGQMLALTLLMVAVAVAVGFLASRVSAAIGRDLRRETFSSVIGFSNAEIENFSTASLITRTTNDIQQVQFVCVILLRMVAYAPILGIGGVLHVVGSSSGLSWIVVLDVALLLLLLIFLMSVAMPKFKVMQQLVDRLNLVSREILTGIMPVRAFSREKFEEQRFDKANRELMGTQLFTNRAMVAMMPFMTLIMNGTSLLIVWFGGKAMDAGTMQVGEMIAFITYTMQIVMSFLMLAMVAVMLPRAGVAADRIDEVIRTKASIHDPDEAIAKAAQAHTDWQGVVQFEDVSFRYPGADSDALEHISFTAKPGETTAIIGSTGCGKSTLLNLIPRFYDVTGGKVTVDGIDVREMPQAQLHDLLGYVPQKGVLFSGTIDSNLKFGGEDITDAQVHKAAAIAQATDFIEAKSEGYQSPIAQGGSNVSGGQKQRLSIARAIAKDPKVYLFDDSFSALDYKTDVTLRRALKAQTDNATVIIVAQRISTVLHANQILVLDEGRLVGKGTHAQLMVSCPEYQEIARSQLSQKELALDTLNTEKEGEMPRPGRPTTERAKNFKGTLRQLIRTMSHYKLPLTAAMLFAVLSTIFNIAGPKVLAKATTALATGWIARLRGTGSIDFVYIGRILLFLLGMYLLSSAFSFIQGWLMTGLSQKACYDFRRQISEKINRLPLAYFEKRTVGEVLSRITNDVDTLGQSLNQSITQLITSVTTMIGVLVMMLSISPRMTLIALLILPVSLALVLVVVKFSQKYFKAQQATLGVVNGQVEEIYAGHNVVKAFNREAVVLADFNAANDKLYESAWKSQFLSGLMMPIMNFVGNLGYVAVAIVGSIFAANGVITIGDIQAFIQYVKNFTQPIQQLSQVSNMLQSMAAAAERVFEFLNEPEEEQLADPARRADPADIDGQVTFEHVRFGYTPDKTVIHDFSCTVQPGQKVAIVGPTGAGKTTMVKLLMRFYDVDAGSITLNGHNVRDFDRSALREGFGMVLQDTWLFKGTIMENIRYGRLDATDEEVIAAAKAANADHFIRTLPGGYQMELNEDASNVSQGQKQLLTIARTILADNRILILDEATSSVDTRTEQRIQTAMDRLMEGRTSFVIAHRLSTIRDADLILVMRDGDIVEQGTHDQLIEAGGFYADLYNSQFEDVVDMNESALEGFVKIVELNSFSAAAEALYLSQSALSQQIRTLEGQLQFELFQHVPRRVVLTPAGQDFYPKAKQLVALYQQALRHARAVQQQEKPPERHLVIAGCHEAMRMFAYDLFSLTSDLCLQYTSILGWCANRSEVWRSLKKGEMDLSFQLESAEFYAQGLTFVPLFYMPELCIPIHPPADMPVGRLTLEQALQYRWLPIKEMYQTVYETSLLQEGMDRGVEFTPVGGIRSAAYGDPALKMVPAVYYRRPDLSFVRVLDWGRGHRFGVVLGQKREDPVVMAYVRALQQQLPSLSEKLFGLKLEPVEEPMNKISRKGFIKIAAAAAMSGVTAGALAACNSASGSASTSGAAGQYIPGTYEGTAEGISSTVKVTMTFSDSAVTDVVVDTSGETASFGAAAADELREQLLAAGSAEIDGVSGSTITSDAVMKAAKSCYAQAKGEAVVSSVQLPTGDENDWLGKEPDIDEAAITETVDTDILIVGAGNGGMFAAAYAAANGLNFRVIEQNANVQDTRHWYGAVDSAAAKEAGEPATDKAKLLSEISRYASGKCDQRVVKTWINESAAMHDFMRSILEDKYGWVCDFTSGSEAAWPAENAEHNTDYLFPVQEHNYMASESASGLPRNELLLQYIQELGYDVDFKTSLAKLEKNSDGRITGIIAQSTEDDHFIRYNANQGVLLACGGFPGNPYMMEQLDPLGTSVTTACSYSPADKGYGIRAAVWAGANLDKESAPMLFDRGIVAPGVDAGYVDSESSFGGKAFPGKIRQYNPGTQPFLKVNRNGERFANESCPYNDIVYAAAHQPGRVYAQICDANILEDAKRFHTIGCSAQTRNGGEKYIQGKMDEAIEAGALFKCDTLDELADKMGFTGAAKDTFLATVERYNELYDKQNDEDFGKPTYRLSAIRTAPFYGCWLGASLLTTEQGIAINEKGQALDTNNQPMEGLYITGDMSGSFFANNYPCLMAGVAMGRTLTYAMKAVKQMAGLENAMSDILDTLRQEGVDPALLTAVQEYRAAHPLSEALRPRIPAPAFTYYGKEVWEQALAAILCGENLLLAGGKATGKNVLAENLAAAFGRPAWDISFHVNMDAASLIGMDTFAGGQVVFRPGPVYRCAQCGGFGVLDEINMAKNEALAVLHAVLDFRRAIDVPGYDRIPLAEETRFIATMNYGYAGTRELNEALTSRFAVVQMPTITQDNLEKLLRAQFPDLSAKYVHQFALLFLDLQKKCDSAEISTKALDLRGMLDALRLIRRGIPAGAALDMGITNKAFDSYEQGLIRDVIAARIPAKLDAGKLFAMDAQSYTAQERRAANQVWAAAGAYGFEPLFLAHNTDGTIDFYMNCIVGLVHKYYGDALIRDIFSAWEGDTRQPMLDDMAWLYLENAAYRLELPRRPVLEALRFAHADYFFAIQYKLSRQEWMAKNQLVYTMQAARWRKVLGHTAPVMTPYESSLAAALEPETVPEPAQLKNDLLALFAKFALFDGKVRQKPALHLRLQGFWAKLATKTMPTQMIKTDRVTVEHSGAVDATGSGLAVNKRRANITLKQRAAQDRAYIESCFGRCFYPPEQLRKAEQELCTGVHLGCHLWFSAGVPSPAQAPTPEARQLAQQAELQAERNRAYYAKNQELHRSVVLRLTEQIRNCILVHQQPDQRVARSGNLCAGRVWRAPYLNDNRVFLCPEEENCPAFTVDLLLDASASRLHCQEVIAAQGVILAESLANCGIPVRVSAFSSLRGYTVLRVLKGFADKNRQNIFRYFASGWNRDGLALRAAGDLIQYAPGPAPRHLMILLTDASPNDSRRIPPTAENPLGCAYEDAAGVTDTAAQVRTLQRQGVRVSAVFMGEDSSAGAATQIYGKNMARIRGMDQLARAAGRLIQNEIRELGDMRKKQLQVSSKRQNFAKAYGMEQTEVQSMVVLYDNRLMDASRYFDAMHNAMSTLHAGAQLLLTIRLQDTCGNDAYLEVKQLPGEQSALVCYSTMGRRCLNFQLFRKGWQLCHNADGQLTGRFPSSADSLLSQTDFRAYCREDRLDAARTQRLVEELGQRAGTNYVGIIPQNARTGAQITVESHLGRGARWSYWSQDASPCLPLAAILYWLADFLAGNERRALQSDPQAAALAAQWLAKDTAVFFCPSPALTVSPAAGHSVPAAQRTRPAPVPAARSKSWQSVLAAMAAVMKRISRRNFLKVAGVGAAALGLAACGGSKSGSTATSGTASSAAGSSTGSVNTAGFTVQYGSNPETLDPALNSAVDGGNTIITVFETLLIINENNEAVPGQAESWTTSEDGLTWTFTMRDGLKWSDGTDLNAKDFEYSFKRMADPDTAAPYAETCLGMIDGFEEAAGFPDADGNPTVEPNLDALNVKASDDGKTLTIVLAYPCSYFDKIVAFAAMSPVQKATVEANGDAWCTSPDTYVCNGPFMITEWTPSERIVLTKNPNYVGGWDSSKIVSESITLLLLEDSSASFAAYNSGEAQLIKDVPTDEIPSLTKAEDGGDFYVDTILGTYYVSLNLKRDAFKDAKVRRALSLAIDRDYVANTIMQGTYSTADSIVGPGIVDENGYFHDNGNAPYISADYEANLAEAKKLLADAGYPNGEGYPTLEYSTNDAGYHVPLAEYLQQAWSDLGITLTISKMEWSSFTAARRAGEYDVARNGWVMDYNDPSNMLDLFCSGNGNNDGKYSNPEFDAAIEASRVADVSEHFAQLHKAEDILMEDTGCLPIAYYNDYWLQSPALKGTWHSPYGYWYLQYGYIEEMSEHKTLVEVQHLQQYFPAGGVGKNRKYVQAVDDVSFAIRKGETLGLVGESGCGKTTTGRTLLRLYEPTGGKIYYDGNLLFDKDNKIAVDMLPYRRRMQIVFQDPYASLDPRMTIGDIVGEGIDIHHLAENEKDRHDKIIALLERVGLNSEHANRYCHEFSGGQRQRVGIARALAVNPEFIVCDEPVSALDVSIQAQVVNMFEDLQQEMGLTYLFIAHDLSVVKHISNRIGVMYLGKMVELADSYELITHSIHPYTRSLISAIPVADPITARQSKRIVLQGDVPSPLNPPSGCRFRTRCPYADEQCANEVPEFKEVSTGHWAACHHLDRVKMSEKILDIKEERLSFFTPAGEVKALNGVSFTMNQGDVLGVVGESGSGKSVTAYSVMGLTAYPGKLVGGKVWFNGHEIENMKEKDFRKIRGNEVSIIFQDPMTSLNPVYTIGNQIVEVIRLHTDKNKADAWARAKELLELVGINEPEKRLKQYPHELSGGMRQRVMIAIALACEPKLLIADEPTTALDVTIQAQILELMQDLRKKLGMSIIMITHDLGVVASMCEKIAVMYAGHIVEYGTTDEIFYQPGHEYTKGLINSIPKLNTAEHERLVPIEGTPVDLLNPPAGCPFAPRCKNCMKICLSKMPPRTELSDTHYTYCWLQQKAAFEKGEKAEMENIKKNPLSLQLNAEDFLPASNEEKQSLVVMRESVNFWKDGIRRLKKNKIAMVSFVFIIAIAIFAYLLPAVWPYSYSEQMKGSNNLKPFEYSASEQARIDAGEKVFPHILGTDRMGRDFAVRIMMGTRVSLSVGLIASVLVLIIGATYGAVAAFAGGWVDNIMMRITDILYTIPDILLIILLGMALKDPLDKLSTQPGFKWMQTLGPNMISIFIIFALLYWVGMARIVRSQILILKESEYVTAARALGASSGRIIKKHLLTNCIGTLIVTTTLQIPASIFTESYLSFIGLGVAAPLPSLGSLATDAVKGMNTYPHLLIAPALMISVMILVFNLFGDGLRDAFDPKLKNMAKYIIKRVAMGIFSIFIVATVTFFVMNLVPGGPFVAEKSISAAAQQALAEKYGLDKPLGVQYVNYMESLLHGDLGLSLRQRGRTVNQIIASKLPVSCRLAGIAVVVALCVGIPLGCISAYNRGKWLDNVIIVFATCGIAIPSFISSVLLLYQFGMNMKVLPTVGLNSAAAYIMPVTALAIYPSAYITRLMRSSLLDVMGQDYMRTARAKGVSQFMILFKHALRNAILPVITYVGPMLASLMTGSFVVEKIFSVPGLGRDFVSAITNRDYTMIMGTTILLSSMVIIANVIVDILYKIIDPRIKLQMPEKGLRVALFCRFCCNMEKNTNGMDGWFRGRDTAFCTDRGGQIVRTNGTINPKAEEVALLPTNIQKICIKYNISLMLCMKKNKVLKIVLIVLGTLVALLAAAVLGVLLYLRSMAASLPETLPDAPADSTQFTLTDDDLDKLLSGEITLEELTGEAAASSGGEQETAASAPQEEAGSAASSGSSGSQTESSNASSSGKKENTTGTSSSSTASAAEKPASSSGKQEAAYETEVKALLKQLYSVKARAESELNSCIAGAKAEYKALPESQQTQARKISIALARSGRLYAMQASYDKEVENIVSQMRTVLTANGQSTALADQAMASYKAQKSAMYSQLTAKLYSMTDLHCHILPGIDDGAKDTAVSLELLRREYEDGVRNIAFTSHFNSERTTVEAFTAKRQAAFEQLTAALEGQPMQFDFKLGAEVFFSPGLCELDTRALCMGDTAYLLLEFPTTHKPHFIRQTLYQLQQQGIVPLIAHIERYPYVLEDPTLLYDWVAAGAYAQINAGALLEPKLCKKLCKFIQWGLVHVISTDTHSPDKRPPRMAQGVQQLEKLLGKETAARIVRNGDELFHDRELDAATLHQPKKFLGMWVMWNLFGKKKKESEHRTLQLITDKGMPFGYVEAYKALRTNLDFMAGSMDVHTLVITSTVPEESKSNVAVNLALTLAESGKKVALVDCDLRKPVLHRYLKAGHNVKGVSNVLSNQCTLDEALQELKEMNLTFLPAGTPPPNPSEMLSQPQMQAMVNTLREKFDVVIFDAPPVSVVTDAAVIGRCVDGAMFVVRSDYAPADAVRGAVKKLQDAGVRVLGSVLTRYDMKKALKGSSYAYSYAYNYNYAYEKQKADVVEMDEKATMGQSLRNMEDEETIDLMELARLLWAHAVQIVAAAVAAALICLLVCVFALTPKYRASINMIVNTRQDNSSTFTSDNFNSAKNLISTYAVIIKGNTVLNEVIDKLDLDMTYTELYKMVEVTSVDSTQIMQITVTDTDAERAGEIAQTISDIVPDVLVEKVEAGSCKAVSDVIIDPNKVFPQTTKYVVLAGLLGAVLVCGVLVLAHLLHDTVVDDEDVQKKLGLPVLGLIPEVMLLLIKYTLLYGIVLMLVALGGMFSEHSGIINIALEGIMVIGGVAGVLTLTMLPASLSPFLVVLISILVAALAGVIYSLLLAFASINLKADQTIGGTALNLLATAIAVVISKYFSESGSAKLNYSNKPFLFSIGGLELSVFVPLGLILLVVSYIVLYKTRFGLRLRACGEHPQAADSVGINVYKMRYAGVILSGALGAIGGLAYIVPPVQTWNFEVGVAGAGFLALAVMIFGQWKPFHIFGAAMFFAVFKSLANIADSTFLAQLHWSSNIYNMMPFVASMVILAFTSKNSMAPKAEGIPYDKGSRMNKKKLSRSSSLQSSVTSVLAALLCILIGLLVGFLVLVAINPAHAWGDGFVRILKGGFHDAPYGVGKELANAAPLIMTGLSVAFAFKTGLFNIGAAGQYTLGAYGALYCAIMLKLPWFVCLLVAAVLGGLWGAIPGFFKAYFNINEVITSIMFNWIGLYLVNELIYQNGTGPMYDVRNTRTLNLSKNADFAQSLIPDFGLNKLFQTNSTTIAIFLAAAVAVLIWVVLNKTTFGYELKAVGLNKNAARYAGINEKKNIILSMAIAGALAGFGAGLFYLSNVSQWNPLNSTSLPGMGFNGISVALLASSNPIGTVFSALFISHISVGGSFLSTKFYPTEISDLISGIIIYLCAFSMLFRGKIQSLLFRNAEKTNVNAEPAPAAEKTKKEGKMAEDYVIEMLHITKEFPGIKANDDITLQLRKGEVHALLGENGAGKSTLMSVLFGLYQPEQGKILKNGKEVAIRNPNDANALGIGMVHQHFKLVECFSVLDNIILGVEPNKMGFLQKAEARKKVMALSEKYGLRVDPDALISDISVGMQQRVEILKMLYRDNEILIFDEPTAVLTPQEIDELMEIMRGFKKEGKSILFITHKLNEIMAVADRCTVLRKGKYMGTVDIKDTTKEELSRRMVGRDVQLQVEKQPAHPGETVLDVENVTIHNDQRKKDVVKDVSFKVHAGEIVCLAGIEGNGQTEFIYGLTGLSKLSGGKLTLDGKDITHESIRQRSKDGMGHIPEDRHKHGLVLDFSLENNIVLQRYWQPEFQKGGFIRADKVREYSDRLIKQYDVRSGQGSVTTVRSMSGGNQQKAIIAREIDRDPKLLVAVQPTRGLDVGAIEYIHRQIVAERDKGKAVLLVSLELDEVMNLSDRILVMYEGEIVGEFDPKTTTVQELGLYMAGARKQGKEEQMRFAHGFLIFCQKAQVKVLLLYGLHDFPPVSPTQAYKKGGVPLHEHPAPITGVIPGMKISRRNFLAVAGAAAAAAALTACGGSSASSTSTASSAAASSAAASGAADGAEKIAKVALTCDTGTIDDESFNQACWAAVSSYMGDNCQYYIPDSDASDEDRETMIRQAVNDGADVIVCVGYLYGASLAWAAEQYPDIKFIAIDVTQGDIGTDSIPANCYCITFKEEQAGYLAGYAVVKDGYTKLGFLGGMAVPAVIRYGYGYVQGADAAAKELGTNIDINYFYGGQFYGDANITSRMEGWYANGTQIVFACGGGIYTSAVEAALKNNGYVVGVDVDQNYIGANGVEKDGYAYNPFITSAMKGLSESVSTALGDIEAGEWSNIAATNGNFGLEDGDYVGLPTADDSWNFKTFTKDEYETLKSKIASGELVVDNSSDDATKPTVSEFTKVNYIQMTKLTMEEKQQLIRMALAAREKAYAPYSDFMVGAALRAADGRIFTGCNVENAAFTPTSCAERTALFKAVAEGVTAFTDIAVVGSRRGEVNRQITSPCGVCRQALFEFGGPELNVIMAKTPEDFIERSMDELLPFGFGPSNVAGNSAVEGKMSTPHISAEMGDFAKTVLMPGDPLRAKFIADTFLQDVRQVTGVRGMLGFTGTYEGRPISVMGSGMGMPSIGIYSYELFNFYGVENIIRIGSAGSYTEKAKLFDTVLATGAVSESNYARVQSGFTGNITLPSAALNEKLRASAAKQGIPLIEGNIHSSDVFYRQPSDAKPTYWEKLRDEDGCLCVEMESFALFANAQVLGKNAACLLTISDSFVAPGITTAEERQKSFTDMMKVALGAEYMTEDKIKEQQPAAQPVRQPRRQKLRSLWAQFQCRGVLRRHRIRRKRQHRWEKLWHKLLHNPIAPMVGETLYAIGFSAEYAVVRTGRRLQHGLQRLLQTVRELLKNIASMAFPGAAQLLRDLFGPVVLALRGTGALLRHAHRVRKENGFGAALRASGHFLAHGIADNIRLVPRMAMYVLPVAALAVMVTVFQTTIRQPYALQVQVDDKTVGYVANEEVFNSALEAVQQRINYSGAEQAHFTVEPTYSVTVAHDVMDENDVADAILKNSSDQISEGTALYLDGELTAVCADGTSLQSYISSLLEPYENPDDPNTTVGFNKDVTLENGIYFTESFQEEAEVEQLLSGVQQAQKTYTVQSGDTIWAIAQKNGLTVKELCDMNTGFAANGENGLTQNSKILPGDALTVVREEETLEVRITKVESWEEEIAYTTETTKSNELNSGTKRVTQKGENGIRTVTAQRVYDANGNQLSQQILSTVVTKEPVTEKVTVGTKKVSSGASYITGRGQFIWPVPGYRNCSRWYGGSHKGVDICAAAGTPIYASAGGTVTKAGYNRAGAGTGYGNSIIISHGNGYTTLYAHCLSLVVHAGQSVKQGQLIGYVGSTGRSSGNHCHFEIRRNGSYIAPQNVFNRSKYRMQLYFAVPDTATTHDGVLVRSFLRQCAVSTDLARAVKFRGGGFFADGVPVLANRRIYPGQMLSFALPPEGDGVTPQPEIPVNVVYEDAFAVVLEKPPQLAVHPTLNYPGGTLANGYAAWAAAHGHSPVFRPVNRIDKDTSGLVLAAKNAYAAPLLAGGVTKLYYAIAQGALPLGEGAIDAPIGRRGDSIIGRCVTPEGKPSRTEYTIIKEENGLSLAACVPVTGRTHQIRVHFASIGHPLAGDDLYGGSRERIARQALHCARQSFAVPVYTPLPDGIRVEMPLQLRTVTVESPLPPDMEALFSMHATKRSLHKSCAVASFYVAATKKLPATADSAKTQKGKRDRPMLDENEHSRKEDGRSLHRLLHKAEQQDATVVVDSAAFFSELPPEQAAPPRRPQQNTPRNTAGGENGAYQPPKRGKILLIVQAILSVLALVQLWRTQMLPVLYLVVLAALLVLLWLLVKRCQEYKTAGTVSRVFSVVLCAAMAVGCVWAQQGLDALGNMTNGFLSNAEANKITKEPFVLYLSGVDTRGDLTEKARSDVNIIAAVNPVTKQVVLINTPRDYYVDLAGTNSKDKLTHAGLYGVQTSMDTLGNLYGVNVEHYIRINFAGFIDIVDALGGVDVYSDQAFTSVGSPGYYDPTTFVEGWNHLDGKAALAFARERHAFKTGDVQRGINQMKVIDAMLNKIKSPALLMGFTKILDAVADSFVTSLSTNQISALVRMQLSDFAEWNIERYTVTGTSGSSTKCYSAKGQKLYVMKPDEASVAKAKEMIAAVMGGEGTVSSTTQTPEKTEVYTPTTDPDAAVSVPETPADSVIVEVPAESVPEQAAEQPAEQPAEQPAETPAEQPAATETPQPETTAPAEGGNTETPAVSLPTQEQVEQAAGSLYSAASTVLDAILGASGNMKNKKLLTNILFAVVVLAIAAVLLAVRSHNATGGKLTAQLIYGDNNAVMDIPLEKDETYSVDTGYYTVHIEVKDGRARFIESPCPDHICEGFGWLSAEDQTATCLPARAVLTIVPVGMKDGFLKAAAFSPALRVADCTYNAQQVLAQLQAAAQRGVKLAVFPEFCLTGYTCGDLFLQRTLQQGALDALEWLLAQSRTLDTVALVGLPLLVHGKLYNCAAVLCRGQLLGVVPKTYLPNYGEFYEKRQFTPGSTEVQTVTVCGQQVPFGTSLLFRCRQMPSFVLGVELCEDLWSALPPSTFHALAGATVIANLSASDETVGKAEYRRALVANQSARLLCGYLYASAGHGESTTDMVFAGHDLIAEDGSILAETAPFAGDYAETELDCQRMEAERARNTSFEHTAEGYVTVEFDLTPEETVLTRRIDPAPFVPGDPQRRAARCELILKMQADGLAKRLEHAHAKTAVIGISGGLDSCLALLVAVRAMKQLHRPAADVLAVTMPCFGTTKRTRSNAEILCGELGVRFQEIRIADTVRSHFADIGQDETVLDVTFENGQARVRTLELMDLANRTGGLVVGTGDLSELALGWATYNGDHMSMYGVNAGVPKTLVRYLVQYEAETAATAALHDVLLDILDTPVSPELLPAKDGEIAQITEDLVGPYELHDFYLYYVLRCGFGPAKIYRLAKAAFAGRAEYTDAVLYKWLRNFYWRFFAQQFKRSCLPDGPKVGSVTLSPRGDWRMPSDACATLWLAELEQLKPGEQMMMPANFSAVSENEMTYVMGGSVADYLAPAMGAAQWQNFHKNLITIVGNKYVQGFLDNTVGAVFSGTWTPGDGLTGFGGQFSKIWKDNYTDNVTGESTGAQKFGYGALGVVNSILNVAGNLAAIYNLGFGTAKNIVGEGVYKAMFHSFYTFFKKVLEHFWKVWYIIAILIRIEPEIPVRKYFFYFMKTVVFVDELLLVNFAAAAALLLGAGLLCGRSCTGLRLCAGSAAAAVSTLVLLAPPWPAPLAVLYKIASCCGVVAVCYGVAGVRSFARLCGWYAALNGLLCGAVVLPGVQANNLSVLLPVRPGHLLLCCAGVYGLLRGLLAVFGRPQRGCFAAVLQIAGATVPVQAYHDTGFTLQDPLAGRRVVLVQYPPVRSRLPAPLRTYLDSWFAAGAAPPPGLRVQFVPCAAVTGHCLLPAVPAALCRGQRRVPGLLAAFCAPDAPTGAWTLLLGDDVAEEVGVMLQFFRKVWQRLWGRLRYCGAVHYLAGGPSLPPPLTPEQEKALLDRMAAGDAAAREELITHNLRLVVYLAKKYENSGVPAEDLVSIGTIGLIKAVNTFTPARSIKLATYASRCIGNEILMYLRKSSNRRQEASIDEPLNVDGDGNELLLSDILGSDANAVSQQLEQDAERAVLRSAVAALSARERQIMELRFGLTDGVERTQKEAADALGISQSYISRLEKRIIRTLKARLESEMYNKVELCGVNTGQLPVLTEAEKRQLLTLAHAGDKAARARMVEGNLRLVLSVVQRFAQRGENLDDLFQVGCIGLIKAIDNFDPAQPVRFSTYGVPMIIGEIRRFLRDNNALRVSRTLRDTAYRAMQARETLEKQLGREPTMDEIAAAAGLARREVTAALESVVEPLSLDEPVYTDGGDAMYVIDQVRDPDSEESWISGLQFRDTVAALSPREKRIMELRYLRGKTQMEVAQEIGISQAQVSRLEKGALQQFHTGGMKADPEQRAVQLGEYIAAHNATVRAAAAAFGCSKSTVHKDVAVRLRSISPALYGQVRAVLARNKAERHLRGGAATRRRYSRRMSKTYSKTRILVECALMIAIGTVLSNIKFFTMPNGGSITLLSMLPFVLVSFRHGAKWGLFTGFVNACLQMIMGFYPPPASTFLYFLGEVLLDYVLAFMALGLAELFARPFKNRTVGVAVGTFAAGFLRFMCSFLSGVLVWGNLNDGLAAWTYSLTYNGSYMLPETLLTMVAAVLLCRVAPQIFDRQARMRVRDSRPPFAGLANLSEAQLHRLPTPCYLLDEAQLCRNGEILLGVQQRTGCRILLAQKAFSNFNVYPVLAPYLAGTEASGLYESRLGREELPEKENHVFCAAYRADEFEELLQYADHIVFNSPSQLAKFGPAAKAAGKSIGLRINPECSTQEGHEIYDPCAPGSRLGTTRAQWDDAVAEHPELPALLDGLHFHTLCEQDADALAVTLAAVEEKFADLLPRMKWLNFGGGHHITRPGYDLATLESCILSVRQKYGVQVYLEPGEAWALNAGYLVTTVLDTLRNGDTSLAILDMSAACHTPDVIEMPYRPPLLDAGEAGEKAHTVRLGGPTCLAGDIIGDYSFDAPLAEGDKLIFGDMAIYTTCKNNTFNGMPLPPIWLLGADGNCRELVHFGYQDFKMRLGTQMSKVLIIGCGGVASVAIHKCCQVPEVFTEICIASRTKAKCDKLAAELAPTTTTKITTAQVDADKVEEVIALIKAYQPDLVMNIALPYQDLTIMDACLACGVNYMDTANYEPENTDDPEWRAIYEKRCKEAGFSAYFDYSWQWAYAKKFEEAGLTALLGSGFDPGVTQAYCAYAKKHEFDTIDTIDILDCNGGDHGYAFATNFNPEINLREVSAPGSYWENGHWVEIPAMSIKREYNFDQVGDKDMYLLHHEEIESLAKNIPEAKRIRFFMTFGQSYLDHMRCLEDVGMLSTTPVNFNGQEIVPIQFLKALLPDPASLGPRTKGKTNIGCIFTGKKDGKDKTYYIYNVCDHQECYKEVGSQAISYTTGVPAMCGALMLLTGKWTTKGVHTVEEFDPDPYLDALDKYGLPRSESHNPALVDMHPNVETFIGCDSSYRAASIVLYGAPYDSTTSYRPGARFGPAAVRHESYGLETYSPYQNADLTDFDVFDSGDLELCFGSSELALADIEARAEEILKDGKFPLLLGGEHLVTLGAVRAAVKKYPDLHIVHFDAHADLRDDYLGAKLSHACVLRRCHELVGDGRIHQFCIRSGDRAEFEFAAQHTEMHKFDFTGLAELTAQLCESKVPVYLTIDMDCLDPSCFPGTGTPEAGGVSFLQLLDAIRTVTKANIIGADLNELAPTLDTTGVSTATACKVLRETLIALDKGWPGFQVMEFWFSEFHTPDVKHSIRVNKQLYSKQSDYQRIDIFETPEFGRVLTLDGNVMLTERDEFIYDEMIVHVPMAVHKEAKDILVIGAGDGGVVRELTRYDRVERIDLVEMDPQVVEACRAYLPGNACRMDDRRVHIYFENALKYIRRCEEEYDLIIVDSSDPFGPSEGLFTREFYGSCFNALKEDGIMVNQQGSPFYAEDASAMQRSHKRIASTFPISRVYQAHIPTFAAGYWLFGFASKKYHPIDDLDAEAWKALNMRTRYYTTKLHIGAFYLPAFLEEMLREVEEHMNENKARSRLDQRRAPIYEALERFRQMRVVPFDVPGHKRGRGNPELTAFLGQQCVGVDVNSMKPLDNLCHPVSVIREAEELAADAFGAAHAFLMVGGTTSSVQSMVLTACKRGDEIILPRNVHRSVLNALVLCGAVPVYVNPEVDKRLGISLGMKREQVAKAIKEHPNAVAVLVNNPTYYGICSDLRAIVKMAHDAGMLCLADEAHGTHFYFGGGLPVSAMAAGADMASVSMHKSGGSLTQSSLLLIGPNVHQGYVRQIINLTQTTSGSYLLMSSLDISRRNLALRGRQVFHQVADIAEYAREEINAVGGYYAFGKELCNGDSVFDFDTTKLSVHTLDIGLAGIEVYDILRDEYDIQIEFGDIGNILAYLSIGDRPQEVERLVSALAEIKRRYRTDGSGLLSQEYIDPVVAASPQEAFYAPKKSLPLRETEGMVCSEFVMCYPPGIPILAPGERITKEILNYIEYAKAKGCSMTGPEDPEILHLNVLAMIRPVCQPKLFGSRPLRVRGTALGAQNGAFCAKKQMPFPPQYAIIKEQMEKEGVWMALPIAIVEDQTPDAQRLEELLQQQLPEAECTWFACGDDFLRAAAEPGLYAVVFLDICMAGTNGIETARRLRQADPEVLIVFVTSSPEYVWDAFPVHPFDYLLKPYQEEKFVHLAAELRRALRCQEPELEIRIARQSIQLPLRKVLYAIARNHYVLITTEDGEYRAMCSFAQIEEKLTALENFMSCNRGVIINMDKVLRFGEDCIEILDGTRLPVRQKDKCTLLAHFTQYQFRHMRQELHMDLALFGRYFLDFALLYPSAFLCLASLWEKLRTPRRTACIAAGCITLLCIGCAALCAVFGLNSNSLLPAIVLVSFWLLRWRVTPEVTVSQTAFLFSISAVMMAVCSLLSTLLNAQTEISNPQTVCLASTALLRLGLAAMLTVLFWFTAVQWSRWLLREYSGEAFWQSAWPLPALYAVFLVYCMPLNPAVVLVGRLKIISVLAVSISLFGIFLLLYEMYRVAREFTRNARLDRENQLLAMESRRYMELQTYLDNTRRLRHDFRQHLHVIAGLTETGQLEELKSYLHQYESELSEHRPSLCANAAVDALAGYYDHAAGQQSVPVEWKLALPRQLPMPEADLCTILGNLLENALHASQKLPPEQRRVQVMAQMLSPAMLGLVVENRYDGMLKKQQGILRSTKHEGTGIGLVSAETVVHKYNGNLHLETEEQIFRVNVLLNLMGFFAVLAASLFAVFIFTVFGGYSLLLWCQQSLWMVVPPALVLAVLVWTFLKMDDKITALQKRVDELEAAQKSTEKLEKMIYDTLNNLPNYLGVSDNLDTVIEYIMARDITTLPAGRTRIDGDKAVVTVSTVTPQTSDKALFQRHDNHITLETDLDGSELFEVSLAELTPTKPIDEAADTTVGTAGTSIAGMLCEGRFALYLAGEPYKSGLKAQGCGKLKKAVFSIELDPDEEETEEMTAVIYARYSSDNQREESIEGQIRECTAYAEKNGITVVKHYIDRALSAKTDNRPDFQQMIKDSEKRLFDIVLVWKLDRFARNRYDSAHYEYQLERNHVKLVSATEPISDSPAGIMVKSMLTGMAEYYSAELSEKVVRGMTENVLKGKYNGGTIPIGFKVDEEKFFQIDPLKAPFVVEAFQRYNDGATMKELMNWLNDSGVTTNRNQKFTYNSVQKLLTNKRYIGENHFKDIVMPDSIPAIVDKDLFEEVQLKIKKNSRAPARHKAEDDYLLTTKLFCGMCGAMMFGECGTGRNKVVHHYYKCATAKRFKTCKKKTVRKEWLEDLVIAETMKLIQDDAVIDAIVAEVMELQDQENTTLPLLEKQMREVENGIENMLNAIQAGVLTNSTKSRLEKLEAQQKELEIRIAEEKIARPRLSENQVRFWLTRFRKIDPNVKSHRETLINTFVNAVYLYDEKVLITFNYKDGTKTITFDEIAAKDAPEGNGSDLGCFAPPRTPVSNGYRSFCFTCLEKGAARVDSNSIDPPNSPAGESPCATATTAASGRNREELLGLRPAGCACRPRHDAAAGSRDPGSFSARLATSARTHIASVPDLMTYKIKYLPLAVQDLNDIARYLSEFYPKTASRILKEMREKITKLGDTPKMCELYRLDPTYRRMVVDQYLVFYRVNDETRVVEIHRVLRGSWNLPQYLKMMQTFVRPSRDLRNHYAEISEMLRDHDHVIITNHGRGESVLINIEDYAKYEEFMHQRYVAEELAKAKQQAADPNTQWADHESVWETLHEQYDVMKYLRNDLREEYERIAKNVPDIEGLQHPLINFSDVLHAYFILADYFTDESSDNIEHMLVGLRSADLLGSALGRQIVSFGGRKKYTDSIEICATLFYGLVKDHAFHDGNKRTALLTLLYQLTLYGYIPSVSVNKYEKLVVAVAAHTVEATYPKEWKKFKKCEEPEIQTIAYLLRQMTKKKDNSYHISPTMKEFCAALENADVSYEASGSKMHFTRVEYSMWKLKKEKYQYTIPFNGWTRTVGAKTARDTLQALKIYDQYATYQDVFDDQEPLYALVDQFNVPLRRLKDEMKQYDVKISHTALSDMEQIYSYIADRLLKPDTAMGQYNRIAEAIQSLNILPERCALVESEPERTQGLRQMLVDNYSVFYIVGEDAVSVARVLYSTSDLVRRLRRMKMLKQLGIPMATAIDMYLRQITLTGGIPFSLSLPKAPAALNADTMTDDQLHAALQVGIKEIQNGDTVDAASAFAQFREQHRMKKILTAIVSVSIFIVGILLILCADTNFLWYAFNQNVRLTVVAGILIALVGGVGVIMNLWCILKELYSKMKYFIDEDQRKASHSSCYLEFQQGQYHDKCWLDTSISISDEVWNSRHVSDLILEVIPEFDFYGITIVTKVQWDNILTKSQSDGCTCKEIIAKAVPWAAKCFETNDVFTIIGMMDNDSFFLVQYRNGKATEIGIQRDLSKVASIKLFGIDMFNTTAECIIDSLMKKDNVICNEKDLQLGTEYLFPEIGVRLWRERAFHLKLLKDPLYMEEMQAVLEDEYQYQYFQMVTVMGMWFFSLAFFAVIFMEMLSDFLLVTDCCTAWKALNGNVSEAEFHNLQQIILCENQKVSIEKKLASTILLVLMICATAAFVWFTFLVELNALLNIDRDRSSSQDAPEETEETETPATRPSVLAALGEKTNQPEPVKPFRSYYDKDGDARMKEKRDETIILRLSKTEKNRIYEQRLMNSALPDDPNSKLNACVNNVLRIWNDTKEQKLTQLIFCDMSTPKGDGSFNVYDDIRTKLLNAGVPEQEIEFIHNADTENKKAELFSKVRSGQVRVMNNTIPFHSAPHAPQITVDVNILTMLKQAASCLTEAAGRDVYLAAIGPDMELTIIMEEDAPSVLPCFDEDDALITVKGAPLFISYNPAQVLKLAGKRYLTGPVIFYRTEGHGAIVSLTVEDIYRFQTYLESHSTTLMADGQKLTCICIDMLNFFFGFAFFEAGAIFGFFVAALMQAARSGEIGLNGEEDSHGMAENTLSVLKIAPGQHPQQVEIDNNLKALQQAVGGSIDAVYPFADPVAIICNDEGKLMGLPLNRALRDEDGQMYDAVAGTFLVVGLGEEDFASLTPELAQKYEQLFHQPEAFLKLGNRLLVLPVPDEPSAEKPRTKPPAECDRMQEEIEQKSFNLMISTTKLSARTVLRAVKAAYRLYQSKASQGKQSVRTLLRQNRGVSSVEISKTGIRGLERYAKKYGIDYAIRKDTSEVPPRYLVFFKAPDAEAFHSAFKEYSASLLNKDKRPSVLARLQELVQAAAELPGKVRHKEQERGLMTTKKLTKLLALYLPYILLGLVATNFGEAWRLAEGKELGDKIMSMMGTIPVAFANPLPSLHPLDLLVGLCCGTGLRLAVYLRGKNAKKYRHGMEYGSARWGNAKDIEPFMAPKFSDNIILTKTERLMMSNRPPDPKNARNKNVLVVGGSGSGKTRFWLKPNLLQCHSSYVVTDPKGTIVLECGNAMLKNGYKLKILNTINFKKSMHYNPFAYVHSEKDILKLVTTLMTNTKGEGSGGDPFWEKSERLLLTALIAYLHYEAPVEEQNFATLLEMLNTMQVLEDDEEYQNPVDLLFEELAKKKPNSFAGRQYKLYKLAAGKTAKSILISCGARLAPFDIQELRDLTMYDELQLDTLGDKKTALFLIMSDTDSTFNFLISMVYTQLFNLLCDKADDVYGGKLPVHVRCLIDECANIGQIPNLEKLVATIRSREISACLVLQAKSQLKAIYKDNADTIIGNMDSQIFLGGSEPTTLKDLSEMLGKETIDAFNTSDTRGNSPSYGTTFQKLGHELLSRDELAVLDGSKCILQLRGVRPFLSDKYDLTQHPNYELTSDYDPKNTFDIEKYLNRKEKIYPGDEFIVVDADSLPSAMEFFNSAIEVLQTLVVALGAGLGVWGAINLLEGYGNDNPGSKSQGMKQLMAGGGVALVGITLIPLLSGLFGMETVLKAIADWIKSILTAGIMSNLSGLFDDVNTQVGNIAQQVGTKPSSFEPRVFAMIEALSRNVVLPIAGVILTFIACYELIQMITEHNNMTQFEPALIMRWIFKTAVSVWLISNTFDIVMAVFDLTQKVVSDSSGIIAGNTRVNDIGLSMLEASLMQMDVGPLFGLFLQSFFIGITMRILSIIIFVIVYGRMIEIYCMVSLAPIPMATFGNHEQSHMGQNYLKCLFALGFQGFLILICVAIYAVLIQSVAISGDAINSIWSIVGYTVLLCFSLFKTSSVTKSVLGAHMAAYISVPRDLTKVKSKVAFNLTKRQLLCFGTAALIGVPLFFVLRDSGGNTAATLGMMAVMLPAFFLGMYEKNGQPMEKLLSYYVQSRFVRPKIRPYKTNNYYAILMKGGMTYDSVLEKDRMIPFWKKTGKHSKPQSTQKRRQKAKPAVPRTAQQSIPMQRMFEDGTCRVRPGYYTRTIQYQDINYQLAQQEDKTAIFEEWCSFLNFFDSSIKFELSFVNMATDSTEFEKSIRIPFQKDGFDDVRAEYSQMLRQQLAKGNNGLTKTKFITFGVEGESMAQVKPRLDHIQNDLLNNFHRLGVQAKPLNGAQRLKLMHDMFNMDGVSKFHFDWKDLVKSGLSVKDAIAPTAFAFKNSRTFQMGGIYCAASFLSITASDISDQLLKDFLDMDSSQIVTMHIQSVDQNRAIKTVKRTITELDRSKIEEQKKAIRAGYDIXXXXQRCQGSFEGIAEPERADVPCHLSGAEHGQDMFLVTFLVLNTGRTEQELENNVFQASSIAQKHNCNLCRLDFQQEQGLMSSLPLADCQIEIQRGLTTSSTAIFIPFTTQELYQSGKESLYYGLNALSNNLIMVDRKKLKNPNGLILGTPGSGKSFSAKREITNAFLVTDDDIIICDPEAEVRHEVAMNDKYSTTEGKTSEKLSDEAMLSAQWKNIDWHKAEREVNRLQIRIVKATQQKDYNAVKRLQYLLTHSFYAKALAVKRVVTNDGRKTPGVDGVLWNTPAKKMKAVLSLTDKGYRARPLRRVYIEKKDKKKKRPLGIPTMYDRAMQALYALALEPVAETTADGKSFGFRKGRCAQDACEYLFNALSRKHISPKWVLEGDIKGCFDHISHDWLLANIPMDKNILKQFLKSGFIYQRELFPTEEGTPQGGIISPILANMTLDGIEKKLVERFHTNALGKVDSRFKNAHKVNFVRYADDFVVTAATPELALEAKELIREFLAERGLELSDEKTVVTNIDDGFDFLGWNFRKYNEKLIIKPSQKAVKAIVSNISDTILRRGKAWQQDVLIMKLNEQIRGWTNYHQSVCASDAFAHLDYVLYELLWRWAKRRHPKKNKWWISTRYWHRVGNRNWVFSTENKELIRVDSTAIVRHTKIKATANPFLDEAYFQKRKFDKGMHRLTGKFKMIWKNQNGLCYHCGMPMDVTEEREIFYLAPKAKAGMEDVRNMRYVHCTCQRIYAENRLKKMLEPYDGKLSRTVLRREGGGNTADPADYAPLVERLHGQVIHIGPASTQYINPMDINSNYSEEDNPLALKADFILSLCELVVGGKEGLQPVEKTVIDRCVHVVYRKYFENPTPENMPLLEDLYNALLTQDEPEARHVAAALEIYVKGSLNIFNHHTNVDIHNRIVCFDIKQLGKQLKKLGMLIVQDAVWGRVTANRSAGKSTRYYADEFHLLLKEEQTAAYSVEIWKRFRKWGGIPTALTQNVKDLLASPEVSNIFENSDFVYMLNQANGDRQILAKQLNISPHQLSYVTHSGEGEGLLFFGNVILPFVDHFPKDLELYRILTTKLNEISEGQKMSNPKLNIKEETSTKKTRSPPKKTRVEQSVPKKKKLKTDADKAAEKAQHLRFGKAELTPDELRRLSKAQKREMYAAHAARSAVHREVDQYEDDNVGTQALNEGEKAAGSVRDISKSRYAKKLKKKAKMQGKKGTKTAKSSAQEPTAAQDTGASGTGKGGSNWLSRWKQRQEIHKSYYAAARSGTAAQTAGGKAASNGASAARSGVEQAVEKGKTAVSTAVKGLMNAAKSNAHVLVIVGVFLLLILMVMSGFSSCGILFSGGTQVSGQTMYSAEDRDIRGAEQDYKKLEKELDKKIKRTPTDHPGYNEYQYHLDPIEHDPWQLTSFLTTLYDDYTRSEVQGKLKETFKKQYKLTTWVEVQIRYKTVWVISPAGIPVPTQVPYEYRIFHTKLVNRGLEVVIREELDADQWKRYEIFQDTLGGRPYLFNGGLPPGGSDGSGTPGIDYQIPAEALTDEEFAAIYKEAQKYVGTPYVWGGSTPETGFDCSGYVCWVYNQNGYNVGRTTANGLWNKSQHISEAEAKPGDLVFFKGTYDTPGMSHTGIYLGNGMMVSAGDPIKYANIHSSYWEKHLAGFGRLSKMSEKSDKLRAMLEKEKERRIKLNNRIEILERRIQEEDSAEVNEMVRTAKVTPEQLAALLRQSAATTPNPAALSAVGATFEKEVDADEDMKIKKLGALLVSAALCAGMAAPAFAFEGEAAPVEQPILPEVVENVVTVTDETSGALTPEGNLTLVDDYHTNYSDGSGQQFITLVSKSGNTFYLVIDRNAKGQQTVHFMNLVDEADLLTLMEEEEADAYTAEKEAAAQAEQDRMKAEEEAKKAAEEAAASGTEQPKENKVTKIASGFLGVVVLIALAAGGIFYAFTKQKQKKQAEKEALDPDANYTEDKGDFEIPTDVPDEDETPDEQDTEPIMSYAKVLGATNRQDGYLEGNGYLVSWCVGHLVELAPPNVYDAKYVKWSIADLPILPQKWQYLVSVSTKKQLGILQKLMHRPDVDSIVNSCDAGREGELIFRLVYQQAGCKKPFSRLWLSSMEESAIREGFAHLKPSTEYDALYNAALCRERADWMVGINASRLFSCLYGQPLAVGRVMTPVLAMTVVREAAIAAFVPEKFYTVDLELTSGCTASSRRIPEKAVAEKLMEACRKEMVATIQRITRKEKSENPPPLYDLTTLQRDANRLLGYSAQQTLDYVQSLYEKKLTTYPRTDSCYITDDDXXXXNMPRTRRTVNREKVTDHHAILPTRSMLQADLDALPKGEQNVLKLIIARTLMAVSKPFRYLETLLTTECAGEEFTAKGKEILEEGWKAVERKVLADILNRKQELTALPNAAENECGILNAELKEGQTSPPKHFTEDLLLHAMETASADSMPEGVERQGIGTPATRAATIEKLVQKGFLERKGSKKTKVLLPTDKGKALITVMPEEIQSPEMTADWETKLLRIERGEMEPSEFMTEINTMITELVKNTEMKKGVNALMKNKIIGICPNCGANVVEREKGWFCENRECRFVLWKDNAFLKRLGKRMDAHVADKLLRDGRVRLKDCKSAKGKTYNATVLLSCEADGRSKFSLEFENGGCMEQKKEAVYLINDERYLHLRENGAGVGFATYNKVTGEPLESGQISEKNLPPDGRNTIPAARNWYLFELSDDDRKAIQQESVKILENIPQAGIGRRRIWEPETLPMDIRLINSHYDDLYRIPDGGVIQVDYPDGRSFTARVEHLDDYHFDMGGLGNVFHICQFAEVMERNHADFYPEIQTQDEQAAWELGGKGYLAIQSCEDGWDYTIYHSDFSVMDGGQLDAPELTIQEAREQILEAHHMEKGRRLLQDYDAVMNKVAEAEELSADHRPSTLEKLAELASDTSAPKSSARSAPELMQQKWNQSFDGEPMTDIPQKFLNAGCDVYMVMQLRHDEKILDERFASMRELNRRGKTPDPEHYEVTYYADLPAMWQDVPNNEVLEELFQVFNLSRPQDFEGHSLSVGDVIALKRNGEVSVHYVDSIGFKDLQGFLDKQPERPSVLMNLKEKCDAPECNPTVCRKARADHELMNFNHEELMLMMLYNTGTRLGLVQELRLMQCYLMPDETALRELSENVIDKLKLLTDEQFAEIEFPMDMDTTKRSPLDRLLFATFLKGRTSSRDIWEEKGDMTPEDNQKIIEETNEIITDDSTYPYLSYLTNLLAKSKPSGDAVKKLHEHIDTIAKGLYEDSTDVFRALLAKLIEQPEETQTFERLLEMAEKFAARYEMPSKTEEYLALAQRTANGLTRYWEHWTDYLTTASRLYKYSFADQLMIYAQRPDATACASFDIWNNRMNRYVRRGSKGIALLDQSSSVPRLHYVFDVSDTGVRRNSRDPEVWQLNDDLFQPVSEMLAREYGIHHERLSQQIADIAGKLAESYWDNNSSDILGIVDGSFLMDYDEAGQELQFKSAAAISIMYTILERCGFEPEGYFDRDDFQAIYDFSTPDAVYALGAAVSDCSRDVLRNIERTVKTTIRRRNVERSQHEDDEQERDLLDRRGLPAPEPDLEPAAEAAGPVRTDAPDVPDGESPGAVQLDAADREAASAPAGSGAGSGEPEAADDDRTAEAEPSPGQSEEPTDVGATHEQPESTGGRSDPDGTDLQLSFFNLSIPTEAQQIEAIDRAENEKSSSAFSLSQAEIEHELRKHGSGFQDGKQRIIELYQTQPDKKLRAKALAKEYGIGGHSHDYLDGSSGFVNYDGKGLEFVHYPDYQKIPLSWIQVEKYIDLMIQSDRYLTDAEKEQRTVRQEAERQLPMLDGTVAAEYTALKEQYPNTLVGFELNGNYLFYDKDAVAVEQILHTNLLSQENTLGKVKVTGFPSEQWVAKSKKLWAEGNNVYLAGLNEDGSHHQTKYLRESDYLPIGSIVKLDDRDFRVEHVNFMFKSVSLQDMELTKNRLPIFRNEHLPRIRELYEEQQDAAIELVPEKEVSYKVGDEVVVDLSTRTIEGTIGYVGETDVRIDTSAHGHSWDNEVINRQQFEEGLRQKEPDEPELTDEELDELPISAVIDGEVQTFPNAAALDEALHAEPVPEPARNFHITDEHLGEGGAKQKYARNIEAIKTLFRLEEEHRGASAEEQEVLAQYVGWGGLADAFDPNKDNWAKEYTELKGMLSEDEYAAARGSVLNAHYTSPTVIRAIYDAVEKMGFRSGNILEPSMGVGNFFGMLPDTMQDSRLYGVELDSITGRIAQKLYPQADITVAGFETTDRRDFYDLAVGNVPFGNYKVADKAYNKLGFSIHNYFFAKAIDQVRPGGIVAFVTSRYTMDSKDSTARKHMAERADLLGAIRLPNNAFKANAGTEVVSDIIFLQKRDRPIDHEPDWVQLGKTEDGFAINQYFVDHPEMVLGQLTMESTQYGHDLTVAPIEGTSLADQLAEAVQHIEGNYTAVEIAAPDVADAEAQRKTLPADPTVKNFSYTVVDGEIYYRENSIMTQIELSDNAKGRVAGMVELRQIVNELIDQQLNDFPDEDIKASQAKLNAAYDAFTAKYGLINDKKNARLFDDDSSYYLLCSLENLDENKNLKSKADMFTKRTIRPERVVTSVDTPSEALAVSIGEHGKVDLPYMAELLGTPGNCERITTELSGVIFKDPAADADDPEAGWQTADEYLSGNVRDKLRMAQLAAESHPEFKVNVDALTKAQPKDLEASEIDVRLGATWLAPSIVQQFMMETFQPPYRIRYNNAITVRYSPYTSEWRISNKSATGFGDIMATETYGTRRANAYKILEDTLNLRDSRVYDTIEEDGKEKRVLNQNETTLAQQKQQAIKDAFAGWVWKDPQRRALLVKKYNELFNSTRPREYDGSHIHFVGMNPEINLREHQRNAVAHVLYGYNTLLAHEVGAGKSFEMAASAMELKRLGLCQKSLFVVPNHLTEQWASEFLRLYPHAKLLVTSKKDFEPGNRKKFCARIATGDYDAVIIGHSQFEKIPLSAERQERLIQEQMDEIEEAIEEAKAQVGEHFTVKQLEKLRKSLKQKLKKLQGADRKDDVVTFEQLGVDRLFVDESQNYKNLFLYTKMRNVAGLSTSEAQKSSDMFGKCRYLDEITGGRGVIFATGTPISNSMTEMYTLMRYLQYNTLQQKGLTHFDAWASTFGETTTAIELAPEGTGYRARTRFAKFFNLPELMAMFKEAADIKTSDQLHLPVPDAKFETVVVKPSEIQQDMVQALSERAAEVHSGSVDPSVDNMLKITSDGRKIGLDQRLMNSALPDDPNSKLNACVNNVLRIMKDNKDVDSLSHTTWRCQYHVVFAPKYRRMVIYGQIKKDIGQILRQLCEQKGIEIIEAEACPDHIHMLISFMGLIKAGMGALGGTLADQWKEFFYCDSLDKDVLMVKGQKRTSRRSSNHGEDNIITNGSGVAVADGQCMLIVEQGRVVEVCAEPGEYTFNSSTEPSVFTGNFGDSLAATFQTVAKRFTYGGDTGKDQRVYYINTKELGEILYGTATPIPFRVVVSEERGYKLSVNIRCNGSFTYRICDPLLFYTNVCSNVSTQYDASELAPRLKSELMNALQPALATLSANKVQYYEIPAHTLEISEALNEQLSNVWRKKRGIEVFSFNINSLSIPEEQQKKITEWEENAMTTDPTTAAARLVGGQIDAMKTAAGNTAGAMTGFMGMGMAAGANGMNAQNLFAMGQQPAAPQQQTSAADSWKCSCGATVTGKFCPECGSKKPEPKPADSWTCSCGATVTGKFCPECGKPRPAAAEGWTCSCGAVNKGKFCSECGKPKPTGTPKYKCDKCGWEPADPAHPPKFCPECGDPFDENDRSMAGMLEYKCPCCDGAIQFDSTTQKMKCPYCDTEFDVDTLKGYDEELKDEKPSEMNWATPGGSWAEGETAGLHTYVCKSCGGEIVGDDTMAASACPFCGNPIVLTGQFAGDLRPDLIIPFKLDKKAAKAKLQEHLKGKTLLPKVFRSQNHIDEIKGVYVPFWLYDSDADAQLRFTATRTRFWSDDDYDYTETSYYSVRRDGVLGFDAVPVDGSSKMADDLMESIEPFTMSDAVPFKTAYLAGYVADKYDVDAQKSIQRANERIRQSTEDAFTQTVTGYDSVKMENSSIQLHGGKAKYALFPVWVLSTSWQGNNYIFAMNGQTGKFVGNLPVDKAAARKWTLGLTAAVGAASYAVMWLLWLAGILMKKTVTPLRSLCAALAALMLLLALAVPAFAADGFADLYYRVNDSAEVLTEDEDGELEASLEELSVRQSFDVIIATIDSLESEGCTSMEEYADDLYDYCQFGYGENRDGVLLLVSIGDRKWHISTCGYGITAFTDAGIQYLGEQMTPDMADGDYAAAFHTFIQWTDAYVTAAREGHPYDVDNMPHEPLSILYLCLALVIGLVTALIVTGVMKSRLKSVAPQRDATSYVRQGSMKLTNQRDLYLYREVHRTERPKESSSSDSGGSSTHTSSSGSTHGGGGGSFMGIWENLGMGSYRGFSRPAARLLQQAVQLAGDLGCEQADTSHLLLAMLQQQGAAAQFLTRKNITEPEVRRQLAQRRSAPAQRLDRQSMAPDLRRTMDYALIGAQNAHVSRAEPEHLLCAMLEDDGCAAGLLLAEMGLSLTEAVRECRQLSGQFVLPAQPRVSASIPRGSRASDKYCRDLTRRAAEGELDPVFCREAELDRMVEILCRRQKNDPCLIGEPGVGKTALAEGLALRIAAGQVPRALQGRRLLALDMASLVAGTKYRGDFEERLKNLLEELVRDGTAILFIDEFHTIVGAGAAEGAIDAASILKPVLARGELQLIGATTNQEFRTHIQKDAALERRFGRVQVEEPTPAQAVEILNGLAPRYERYHGVRLPPQTLQAAVELSVRYLPGRCLPDKAIDLVDEACAAARILAEKEQRTQPVLSPEDIARVVAAASGVPAQRVGEQERERLDKLESRLNAEIVGQQRAVAAVAGAIRRSRTGLGEPGRPIGAMLFLGPTGVGKTALARALAVSWFGSEKALLKFDMSEYQEQHTAARLLGAPPGYLGHDEGGQLTEAVRRRPYSVVLFDEIEKAHPDIQNILLQILEDGQLTDAMGRKADFRNTIVLLTSNLGARFLAGQNAPLGFAAGAEAVFEKQSAQAVEEAKKWFRPELLGRLDEVIVFRPLAEENLCAIAEKMLCQLEQRAARSGYRLRHTPQVGAALAARAQSAYGARELRRQVDRAVEQALANRIAAGTACVGQHWTADCAADGSIILREDETITLMHTLFLLNPAAGKADCTRTLPQQIAAAAAGAGLAPEDYTIRVTTHAGHARELSRAAAAAAQKAGVELRIFTAGGDGTFNEALTGAHGFDKTAVGCLPYGSGNDFLRTYGTKEEFLDLDAQLAGGVVPIDLMRTSLGLSATICAAGLDAQVAYGIPKFRRIPLCGGEAAYAMSIVQQLCGHIGRRVEYVIDGEVLTVDCLMCAVCNGRAYGGGFMAGPEAQPDDGWLDVFIVRKVSRRVIAKLLMLYKNGQHFQNGQLTEAAKPYFIYRRAKSVSLRAADGRGPIIATVDGECAPCKQVSVQVQPLAGRVLLPLPAYQRFTTKKAGVKMTDKKLISSLQGLRAVAFLSVVLSHCGTPWLGPWAITVFVALSGFLMTCNYYDRPRTAPGLRSAIAFSLQKIRKLYPLHLIMMAAALLFVLKWLLAQPSARGVLSCAAQLVVSIFLLQTWIPSSRFWFCLNGVAWYLSVQAFLYAIFPPLLVVLKKADARRLRCIAAVIFCVQCLFSLAVWKAGLSGKAAFYLTYLCPVFRAGDFTISCCMGCLYHSRKQESGLPGGAFSLLELAAVLLAGGCLFIAAKQVGVLGAVAFRYNVLFTPSAVLLVWLLAVGKGIISRLLSAKPFLWMAGLSPYGFLIHQVLIRYMEWTADKFSLTVHPVVWTLTVYLLTLCLSSFYKALEHRVRQRLAKQMKIIPLADRVVIKTVEVEETTKGGLILTGSAKEKPQVAQVIAVGPGGVVDGKEVKMTVKVGDKVLTSKYSGTEVKVDGEECTIVRQSDILAVVEDMAKQIKQGENARKALCAGIDTLANTVKITLGPKGRNVVLGKKFGAPVITNDGVTIAKEIELKDEFENMGAQLVREVATKTNDAAGDGTTTATVLAQAMVNEGMKNVTAGANPMDIRRGMSKAVTTAVETIKAHSQKVKDSNDIARVGTISAGDPEIGRLIAEAMEKVTSDGVITIEENKTTAETYNEIVEGMQFDRGYLTPYMVTDTDKMVADLDNAAILITDKKISVIQDLVPLLEQVMQNGMKLLIVAEDIEGEALSTLIVNRLRGTLNVVAVKAPGFGDRRKEMLQDIATLTGGTVISSDLGYELKDATVQMLGHARQVKVTKENTTIVGGAGDKDAIAARIAQIRSQIEAATSDFDREKLQERLAKLAGGVAVIKVGAATEVEMKDKKLRIEDALNATKAAVQEGVVAGGGTAPINAIPAVRALCDTLEGDERTGAKIVLKALEAPLRQIAKNAGLEGSVIIDKIISANKPNYGFDAQNEVFVEDMIAAGIVDPTKVTRSALENAASVAEMVLTTESLVADLPEPPAPAAPAGGDMGGMYMENQRDFCTECRRETSYTLKKIKINRTIREKEYTFEITAAFCNKCGGEMGMDADYVENIIRNIDKQSYKCILVDGAWGIGKSYMVRKALEDMKDRTCFISLFGMDDVQKIYHEAFFQLALRTSHGGKIASGAKGFAKAAGNFCAEVANLNGALAQAISERELFAVTASNFKKNRIIVIDDLERRKAGLDLEELFGVIEELKQSNYIKVILIANSNEIHENERTTFNKYKEKTIDRIFEVTEHSASIKWGVYGIDGEFIDVFLMHHKAKNLRTLQKAQNFYNDVKQYCLKIENEQFMNEVKMLCFAVVVEDVDKLYYKNDSIEKENTNSRYRKDGHILSNHLNVRLANYVYLQSSGALLDDIYNYFKSSKMLSEETLQKHYQKFKEAGDKANYYKTDEEIETYIQSWKAKLHEASNSVELTQLAGEYDYWFQVLEKDDDELIEYYRDVLKNMFLCENRSDKRSPLDYYNSNEFHGATEKIRNIYEEVLKQTKKEIIRTYIEKLGGSLDEEIAYEYSYWLKDWYTGTLEMHRYIDEEIDPLYQRNSFPVDNMSKTKKMVCYNIMTLLYLHDKEKLEKCYNSLKSDFSKMGIKRTEDILKEIREDNMFGERLAELRKLNDDTQQILADKIGFSVWAVRAWEQEKNLPPSDALLAICKLYGTSADYLLGLTDIDPSDEARKQRQRLTEEEQNEMHRYEEYLLWKRKKMEQLIDFHAPEVQAVLDTLLKDKSTGKNIIWATDPPEELQTVMYEPVTDKSQITTQQLGLTHYEVVLPRMMKQTDTQQQRTRKKGEVFSPAWVCNKMNNALDTDWFRVLGAGESAGQFTVELPQGWQTVETPVQFPACGGKTPAWVQYVQSRRLEVTCGEAPFLASRYDAATGEMIPVARRIGILDRKLRVVSENAATEDEWRKYATHAVQSTYGYEYQGDNLLLARVNLLLTYAEHLQARWQRKPTKEELQPIANIISWNLWQMDGLHLSVPGGKPQPETEQLDLFSMFGAAEPQPPTVSCKVKNWRKGSHGTTRNFETIQEGSTSMKFDYVIGNPPYQDETLGDNKGFAPPVYNKFLDASYEIADKVEMIHPARFLFNAGSTPKAWNEKMLSDPHLTVLHYESDSSKIFANTDIKGGVVITYRDKVKNYGAIEHFIVFDELRSIARKIGKTDYVPLSKVIYAAESYRFTETMHEENSSVESLLSKGHKYDFKSNVLSKLDNIVFFSEMPKDGSSYIKILGLDGSKRTEKWIRKDYVRVPENFGSYKVFISKANGSGAFGETLSAPIIAEPGIGHTQTFMSIGKCESEQEAIAITKYVKTKFARAMLGVLKITQDCPAPKWKYVPLQDFTAHSDIDWSKSVAEIDRQLYRKYDLTADEIEFIETHVKEMAMAGITLRTARQVVPMIYAYTTPEIARHNGWTKIGYTEQSVDKRLKQQTHTADVLYHEEWRGNAVYDDGSGEVFTDHDFHAYLRKLKVENDRKNEWFHLDGQQSRRYFQDFRMNRGRVQLDAAIAYTLREEQARAVHDTKIYYQSHPGGEYLWNAKPRFGKTLSVYDFCKQVDAQTVLIVTNRPAIANSWYSDYVRFLGRESGYLFVSHVDALAGQPHVLDEQGYLDAAAQGEKLYKRIEFVSLQDMKGSKYFGGEYDKLRHLTELNWDVLVIDEAHEGVDTYKTDLAFDRIRRRFTLHLSGTPFKALANDKFAGDAIFNWTYADEQAAKRNWQGAPGQQNPYANLPMLNLYTYQMSEIIRDEIRQGVEIDGETQEFAFDLNEFFKVKSGGSFEHEAEVDRFLDAMTTQNKFPFSTPELRAELKHTFWLLNRVDSARALAKKLQAHPVFRDYEVILAAGDGKLDDTDENQKSFDRVKAAIAHHEKTITLSVGQLTTGVTIPEWSAVLMLSNLKSPALYMQAAFRAQNPCLFHENGTFRRKENAYVFDFDPARTLLIYEQFANDLSQDTASGKGDTEERKAHIQNLLNFFPVIGEDEEGEMIPLDAEKVLSIPRKIKSKEVVRMGFQSNFLFQNISNVFSAPQEVLDILQNFQPISEAKAKPIQITPETGADLSLNDKGEVDLDEGYVIGKAADVFGEKIYESTPALDTALQDLTDAPAPAKEEHLEPLKKSITKEIITPMVEQAKQEYGRDLKLSDQKRFESTAKAKMDVAVNKVVDNYRIDQSQLETQRTQQLQSCTTAQQRQQVNREFDAKQQQSTAALMETLQSTIQQTAQEMQQTIVRTVETNQKEQEKKGYEDTVRDHLRGFSRTIPSFLMAYGNETVTLANFDQIIPDKVFQEVTSITLEQFRFLRDGGPYINQATGQEEHFAGHLFDPVVFDDSVKEFLNLKVKLADYFDESRTEDIFDYIPPQKTNQIFTPKWVVKKMVDLLEQENPGCFDDPGKTFLDPYMKSGLYITEIVKRLYRSEKMRQAFPDDNARLEHIFAKQVYGLAPTEIIYRIAISYILGFAKDHGITAHHIRQADTLEFAKAGTMERELDKIFRDMDMTPQALSYHLSKLKKADLIYETRYKNYIYYELNLSILDETIMWISNLRGGQQMKKKMVAFYSLMFLPLVVVLIALQFLPEQIPAHYDMNNQVTRWGSKYETLIFPVITVLFGYFMLAMAKLSSKQEENGSNNKNVCIVIGIASLALFNAMTVYFLYADFNSIENLSSIALDLNQLVFGLLGVAMIILGNIMPKLRMNSVVGLRSIWSMKNETTWKKGQRFGGISFIVSGIIIIMVCFLTKGISCFWWTMSIVAILLIVDTYYTYTLSKKYMPQSVIHEMLYMKHPTRLKILQGVFLCSNLYVTSPETGAENFSEITDVEAQQLGFPFMKEVRVCEAMKSPVGTLSDEMVLHQQDGGTKSRQVPIWEKSNLTLEEAAAYSGIGINKLREITNEDKCKFVLWVGNKRLIKRRLFDCFIEQAYSIMSEKRKDSKGRVLKDGESQRANGTYDYRYTDIHKKRRCIYAKSLTELRKKEEELWRDLADGIDYAAGEMTVADLVDRYMNLKRGLKPNSLRSYNTAVKRIHADPFGQKAIKTVKLSDAKGWFVFLHDSGFKQNTIGILQSVVRPAFEMAVEDDIIRKNPFKFKLSDVVPKDAYVRNALTREQQEKYLQFVQDYGGNYYDDIVILMGTGLRVSELYGLTRADIDFERHCIHVRRQLCRTAEKPYFVTPPKTKSGIRNVPMTDTVCAALRRVVKARASTKVEALVDGCSGFLFLDKSGMPKVAMHLENYMRGVQGKFEKAYSKPVPRITPHVLRHTFCTNVQQAGLDVKSLQYLMGHSNASVTLDVYTHSSFESVEKAFEQIAGNLMSGKRVLAVYAALLLGFAVVLCRLYLLAQHPAYAARAAAQSTVTLQLPARRGNFYDAQGRLLTGLEERWQVVCFPGQGNYDRLYACTDAAGQALLYRSRSRAAPFLLEVSCDPARLGLTGYPAARRYAAVPLCQHLLGYLDSTGHGAAGLEKALDAVLSGTGEHSSLVCAVTAQGTLRTGETARLLQADSGALGVQLTISRPVQRAVEAVAASTMTSGCILVLDTATAAVRASVSVPCYDPENLADSLQAENSPFLNRALQSYAVGSVFKPVLAAAALEAGLQPVFECTGAVVVDGQIFRCAGGVPHGQVDLAAALEKSCNGYFIRLGQQLGAESLLDAAKAFGFGQSLPLAEGLAAEAGQLPAPQELAQSGQLANFSFGQGSLLAAPMQVAALFNTIAADGVYRSPYVLQATLDETTGQPVETLSHPRGRRVISAQNAALLRAMLVQVVQQGTAQDAAGLSGGAGGKTGTAQTGQFTPEGTERCNLWFAGFWPAEKPRYTIVVLQDGAVHTAYSGAAIFAQVCNALEAAGMSVIEIVGGAILLVASLVIVFLTLMQHTHGQGLSGAINGSVGGANNARLTPADQMLAKVTRIAGVVFFVVAILACLFAGRLAGMNGRGCFSVQKKVRAAGSAGCRKEGTGESARPKAGLCSAGDARPRKMAMRDKIEHAIQNQPCTVKDLKNKFGGDRGADRKVMEAVDQLVHEAVICQRQGVFFTVRSGRADKALLCKVVKLGKNFAFVMLEDGTSDIFIPGRFTRGAMPGDKVLVEKFAHPRVEGSDEGEILAVLEEKNSLVGTMHRMEGRLKFVPDDCPAISMQVMRDCEGSAKDGDKVAVEILLRGNRQEDHRVGVAMRFGSCDEAKRCAKALLYAQDIRNRFPDKVRDEAKKLDNAEVSAADCEGRMDLRALPIFTIDSAETKDIDDAISLTKTPDGGFELGVHIADVSNYVKPGSELDNEAFNRATSVYYADQVVPMLPKQLSNGICSLNEGVLRLAFSCLMRLDKDGNLTDYRFVKSVIRSRVKGVYSEINALLAGSTDDELTGKYHEVLAQLPAMKELYGHRARLRKERGCMDIESGEVKLILDEDGHCIDVKKRTSGESEAMIEEFMLLANQCAAHFARVKQIPFVYRVHEEPNAEKLERLHGLLQACGVNDHFAKDVPTPKELSAILEGVRGTAYEQIINVGMLRCMSKAVYEEKPKGHYGLVLQDYAHFTSPIRRYPDLAIHRIMTAQLKGTDKDTMILRYSEFAEDVSKQASEREVIAMQIERKAEDCYKAEYARRHLGECYEGRISGVTQRGLFIELENGVEGFVPASSLTATGTMLTEGVRLSDPVSGKNWNLGDTMMITIVRADVNLGKIDFEVAPESAKQMQEKLDALVRTQAMQLFRQQGLHFTMQQVAEPLHISKKTIYTVYPSKEALLLDMVDHAFAEIHRCKQEILAGGGTLQEKLRAVIIAMPAEYAALDLRQMKELDEKYPVVAARVRSQLENGWEPTMALLEQAVAEGVMRPVSMPVLRQMITASIESFLADRSLAESGVQYVAVLEEMISILLEGVLPRMKHSFCEDWEFTRHWTEAFGKGLPVPKQQAVRLPHTCREVPLHYATPADYEMVCGYRKRFRVPPVQAAPRLFVRFDGAAHQAVVRVNGRVAGQHRGGYTGFAVEITDLVDREGENLLTVQLDTREDPTIPPFGFVIDYLTYGGLYREVWLEATAESRLTDLFVYTPTLQEAVVQWTAELTPAAAAVRIRLETAEGTLLAEQTAPAAETGKMQLSVPEAQPWDTEHPVLHHAVAELLNAAGQPIDRKQVTFGFRTAEFRADGFYLNGKKTFLRGLNRHQSYPYIGYAAPESLQREDARILQEELHCTAVRTSHYPQSQYFLDECDRRGLLVFTELPGWQHIGDDNWKDAACEMLQEMLLQNRNHPSIILWGVRINESVDDDAFYTRTNKIAHQLDPSRATSGVRYLEKSHLLEDVYAYNDFSHNGVTPGAKPKKDVTPDMGKALLISECNGHMYPTKPFDDGPHRQEHALRHVRVQNAAYASGEHAGCFGWCMFDYQTHKDFGSGDRICYHGVLDSFRNPKLAAAVYASQGDTDPVLAVSSSMDIGDNPAGQLGTAYVFSNAQQVKLYKNDVFVTALRRSEWTALPHPPFVMDDTIGELLETQEHFSPSKAAAVRDCLLAAGKYGLAGLPLAYKVKFGWCMLRYKMAFKDGVALYGKYVGNWGGEATRWRFDAVQDGNVVRSVTLCPSAKLHLEVKVSRTVLREKDTYDMAAVRVRILDENGIPAPYAQFPVQFTVDGNAALVGPQTAVAEGGMTGTYLRTVGTAGEAVLTVSAPQTQPVVLRFTIEKEDAVWNMELTLKQKTAFGIGAVGKDMVYALSASYVMYYYQDVLGLSASFVGLVLMAARFFDAFNDPFMGVLVAKTRTRWGRFRPWIFSGTLLNALVLYALFAAPVLDEAALMVYFSVVYILWGVTYTMMDIPYWSMIPAVTRTPKDRENLSMVGRTCAGVGSALIAMFTMLLVGALGGDSERAGFRWVALIVAVIFAVTELVCCISMKETTPSEMKTATVKEMFSALFRNDQAMVVVGSIVLINSALYLTSNFIIYFFKYDLGGAGWKATYTLFSTVGGAAQILGMMVLYPLLRKKFSSTQVFHLSLVLALCGYGTLLVFCLTGLSHSLALLCIPGVVVFACNGMLTVLTTLFLSNSVDYGQLKTGRREESVIFSMQTFVVKAASGVAVFLTGIGLDLIGLVGNTEETGPVAVQSAGTLLGLRLMMTVLPMLVLAGVLVLFRRKFILTDARAAEISAQLHGEETHHDMTETLHWYAETTGGVRQGDAPVHPGCGAVHLSADLPAGTLKAVRAELPWKMEADERLFMNGYQTWTYSPELNRNGKLRGTDHIPGFLRKKYAFDRYGDYHFVTYGHHNGQSHGFSYCYFRKGGRFQLVASLDETPGYTILRYDSRKALLTLERDCAGVEHPGGSFALFDLFFAEGGETEVFDGWFRAMGIRPRTEKKLAGYSSWYNRYQDITEDTIREDLTGCRSLLCPGDLFQIDDGWEPKVGDWLETDAQKFPHGLKGMVQEIHASGFQAGLWLAPFVCEKDSALFLQHPDWLLKVDGAPWCCGSNWSGFYALDIDNPAVLDYLRRVFDRVLNDWGFDLVKLDFLYGAAPFGNAHESRAARMRRAMELLRSWCGQKAILGCGVPVMPAFGLVDYCRVSCDVGLDWDDVWYMRLFHRERVSTKQAINNTLFRRQLNGRAYGSDPDVFFLREENCKLTAEQKRTLATVNALLGNVFLTSDMPSHYTDAQRDEYRRLRRLFEHAKQVEVETENGAITIRYSLDEKCQELRCSAIYREMPLQKNQILTLRIERLSSDGSGVAHSADGEAVFVPGTAPGDEARVRIVKDCGRYAFGILDELLTPSPDRVPVDCPVAGPCGGCSLRHLDYAAELRAKQESVLDAFRRIGGLEVPVLDILPSPDVDRYRNKVQFPVGVDKNGVPCIGFYAGRTHRIVPCPDCKLQPSVLNEIGNTLCAFFAQQGIRPYDEQSGKGLVRHIFLRRGAHSGQIMVCLVCTRAKLPHAEQLCTALRGQFPAISTILLNVNAKNTNVILGSENHILYGPGYIEDTLCGVPVRLGPLSFYQVNTLAAERLYGVAAQYAQLTPDDTLLDLYCGMGTIGLSMAGQCRELIGVEIVPEAIESAKANAARMGEAVAAKSRFFCADAGQAATQLAAEGLHPDIVMLDPPRKGCDEATLSAVVRMAPRRVVYVSCNPATAARDAAWLEQNGYHAEKVQPVDLFPRTKHCECVLSMSKAQMPDVYKQSFKQNYTNNIELSIFNCGLERCAPGQTWGPGIRDHYLIHLVVSGKGIFEVGGRTWEVSEGDLFFARPSQLIRYTADEQQPWEYSWVGFNGACAHKLAAQLPFTDDAPVHHTSDPDGMRAALTNIYSSRGLQPQDEAAMVGYLYLFIAALMRETSAGKPHTASSSSQYVLNAIKYIQFNYSHDISIDDVAKSVGVSRSHLYRVFMLNVGKSPIDYLTEYRINEACKLLRAGNLSIAEVAVSVGFFDQFYFSRVFKRAKGVPPSKYFAAQQDADPASPAQLMATSAQLRKQILQGSWDAVLAALYGANPAVLQRQRGRYAAALEQFELYFGPGRQVQVYSAPGRAELGGNHTDHQGGYGLAAAVTLDMVAVAARNTDGYVRVKSRGFNKLDVIDLATAEPQAGESTHSASLIRGIAEGFRAVGKQIGGFDAYTASDVLRGSGLSSSAAFEMGMASIWNEEYSTGLTLAELAGICQYAENTYFGKPSGLLDQLTSAVGGIIFADFADPRTPKIEKLHADGLLPEGMFLCVTDTRGSHSELTSEFAAIRQEMEQVAACFGKPLLGQVEENAFWMALPVLRSCCGDRAVLRAIHYFEENARTLAQRDALYAKQFPVFAGLVKQSGQASFALCQNVYCTADVRHQGLSIALALSQSILQGSEGAWRMQGGGFAGTIQAYVPGQLLERYHTAIEQVFGQGSCYVLRLREQGAVRVIMKKLQLPSSYAALSPEEQCAAFGGSEFGDAVGSFFDNLHFNDFFWNGGLISFSFTFVPMLLFRVIKTGVQTGIKLSQQIGRLLGITREATVTAVQYLDNTQQRNDQPVENSLPQLFSLQMDHTYQRPLQLPACCSVLSAEEMTYTEGGALSINITPEQVMAFGINATVNLLGMMGRYAFQAAVSGMQNALNDGLGVGDAIGHYWGKLNTWSKVATIGMAGLGGYYAYCQARSIYLSIKNLVDAFKNTYNEIQAKKKAEQEAAEQQNCLPTLVALCMIGFFSTFLLQHFFAVKKQEFCAFMAYSGQFYNASSQYIHKCIMIFKPALSCHFCADMLQFSYMRASGILMPVFSLPGPFGIGTLGSEATAFVDFLAEAKQTYWQILPIGPTGYGDSPYQSFSAFAGNPYFIDFRLLAADGYLTAEEIPAAQPVSTVDYGALYNQRPVLLKKAADRLLAAPSPAYEAFCTAQSFWLEDYALFMAVKAEQGQAGLADWPDALRCREPEVIAAAKVRLADQISYHKAVQFFFYTQWNALKAYANRKGVLLVGDIPIYVSPDSSDLWTQPELFQTDGQMHLTHVAGCPPDSFAADGQLWGNPLYDWPTHKATGFGWWKRRMKHATSIYDVVRIDHFRGFESYYSIPAENTTAAGGHWEKGPDRDFIHAMQQALGGGNIIAEDLGYLTPEVKAMLAESGYPGMKIMQFAFDSRESGNYLPHTYPRNSVVYTGTHDNVTTEGWRSNASAEDVAYACRYLRCTPETLTEGMICACLASVSDTAIIPLADWLHLGSEARINTPSTQGANWRWRLAQPLPAALAGHIAALTTLYERVPKALMSKQKRTWDVILVVVMVLLCLLWIYPIVLILLNSLKTEGSFTTSTVFRLPTAETFAGLRNYVYGVTKMDFLSSMGYSLLITITSVVLILLCCSMTGWYLTRVNNKLSKFMNLLIVFSMVVPFQMVMFTLSKTADRLNLNNPWNICIIYLGFGAGLAVFMFTGFMKSVPMEIEEAAMIDGCNPIQIFFKVVFPILKPTMISTAILETMWVWNDYLLPTLVLDIKKYRTIPMAIQYFRGGYGRVELAPMMACIIIAIIPIIILYMTCQKYIIEGVVAGAVKGMQKAISKYWPIFVLPTLVAFIIGFIWPFIWGVYLSFQRFTTVSKTTFVGIQNYLSVFQDSTFLHAFGFTAVFTVVSTVLINVCAFAIALVLTRGIKGTNIFRTVFFMPNLIGGILLGYIWQILLNGVLANLQKPLLALDAKAGFVGLVILMCWQQIGYMMIIYVAGLQSVPGDLIEAAKIDGANDREILFKIKIPMVMPSVTICTFLTLTNSFKLFDQNVALTAGEPANASEMLALNIYNTFYGRSGAQWKGIGQAKAVVFFLIVVVISLIQLHFTRSKEVQQMKKMITRRNFLKAAGVSAAALGLAACGGSSSSTASSAASSTAASSTAAKADGKVYYLNFKPEQDQDWQDLAAEYTKETGVPVTVVTAASGQYETTLMSEMEKSEAPTLFQVNGPVGLANWKDYCYDLSGSQLYGELTSDSFALKDGDAVTSIAYVIETYGIIYNKELLTAAGYKQEDIKGFADLKKVADDIQARKAELGVDGAFTSAGMDGSSDWRFKTHLANLPIYYEYKADGIGSTDAIKGTYLDNYKQIWDLYITDSTCDPKLLASKTGNDAVAEFVGKKAVFYQNGTWAYNDVKDLGDDNLGMLPIYIGVDGEENQGLCTGSENFWCVNNTASEADIQATLDFLYWCVTSETGTSAMADKMGFVIPFKKAKDSTNPLITIANQYVADGKTSVDWCFSTMPSEEWKNGVGSALTAYAAGTGKWDDVVTAFVDGWAKEYKLANGMANLTIKDIARISGCSVSTISRVINDRPDVRPETKEHVLKVMREAGFVPNTNARQLKIQQSRSLVFVVKGTRNIFFSDFLVQLQRAATLYGYNGIVSYLDENANEIDAAEKILREIKPKGIIFLGGSVANFQRGFDRINVPSVLTTLVTDELDFPNLSMVGVDDRAAAYTAVDYLIRQGHRKIAVLGGPVTSYPSLMRRQGAQQAMEDAGIVFNDKLYGLSNYDFESAYHAMNSLLARRAEFTALFAMSDVIAFGAIRALVSAGLRVPEDVSVIGFDGITMSRYCVPVMTTIVQPSEQIALQSIELLVRQIEHGSSAQTVTLQPELQQGESVRAIMILSLQGCMAVGKTTAARYLEQHCQQVQVCFEDNAAVLAEIKQRGLNKNSYADYLEIQRLFCAMSCAAGRKQKNTPTPMDFGAEEIEFYTLNYPKSRGLEWEMEAIRQALAPELAAVQACMPEHILFLDASEAVLRARKAGDATRSREFFAYYLNHLLSLKREWFREKKNVTFLSTDGLTARQVGEKVKHWCEQYIMAFERTEGSRPARPMRRGRKKVCSFCVDRIDTIDYKDVPRLRKYVSERAKIIPRRVTGTCAYHQRALTIAIKRARHVALMPYVSDMLNVVAIMGRLARDPEMRQTTTGKNVASFRIACDRGRRDANGQSVADWIDVVAWDRQAEFVCRYFQKGSLIVVDGRLQSRQYQDKTGANRTAVEVVANNINFAGPKSSNAGDGNGYQNAAPSYQNAAPARPAAVEAAPSYSAGNADDFAVIDDSDDLPFMAKYETMLITSAALDEEASAALVGKFKSLIEANGTIDSIDEWGKRRLAYPINDEEEGVYTVINFTSEPSFPAELDRVYKITEGVMRSLIIAHEEMYSLFRDLAIIILSAKFFGLVARKCKAPQVVGEIIAGLLIGPCVLNLVQISDSISIFAEIGVVMLMFTTGLGTNLKELIKAGPIATLIATVGVAVPLVGGTLLYGAFYGFAAVGSPEFYRALFIGTIMTATSVSITVATLQELGHLKSFLGTTIVSAAVIDDVIGIVVLTCVLGASSGTGTGLGKVLFNTLLFFATALGVGLVVHYAMKWLDQRNPHTQRITIVSMAFCFAMAYIAEEYFGIADITGAYIAGIVLCTMDDAPYVERRVDISNYVIFAPIFFASIGLKTDISGLTPEILLFCVCFVVVALITKIIGCGLAAKICRFNWDDSLKVGVGMMTRGEVALIVAQKGLAIGVVDPVYFTAVILLIVVSSVATPLALKAMFTKRPPVPHPSQANMKKVTKAVIPAAGLGTRVLPATKAMPKGMLPIVDKPAIQYLVEEAVRSGITDILIILGRNQSIIEDHFDRSPELEEKLAKPGKEKMLEECLGIANMANILFVRQKETLGLGHAVNTAKAFTGDDPFVVIYGDDVIWGEDPVCAQLIRAYEEFGRPVAGVSAVPWEDVSRYCSLKTTPIHDNYFFVDDMIEKPKKGQEFSNYSILGRVLLTPEIYEILAHTKPGAGGEIQLTDAMAEYARTRGGMTAVEFTGKHYDMGNKLKVVEAQVELALQHPEIGEEFRAYLKEFCKTLMPKYYGCPCEGCGKPLTLQDDIVVCPDCGAPYHRTCYEKMGLCIHAPAHGAGYEWKFPYQDAQLRTCPTCGERTLRSENVCRCCGAALPPESAEQPNDRAAASAEQNRDFDYSRMYQDEMYRNFTEKVVDPVHRNVRAAFGKDELIDGVPYQDWVDFIGTAAPVYLNDYSQMQLRHSKISMSFSALLFGPFYFFYRKAWKPAFGFLAAELLLFIPTLISMMQTTGSPLTAGISASMLVVLSRVMSLLSFALMLVRGLYGKWLYRRSAAARIRRIRAEFPDPEQRRAVLNAQGGVSFAACIGAFILLMLVGSLCSMLLGPDLNALVGTFIMITTDELKVQLAEHAKAVKDLEEALAIEASRKRVQELEHTMSRPGFYDDAELSKKVFDEVGDLKGKLNRFEKLQGLYDDAETMLEMLDEEYDPAMIPEAEEAVNTVGKAVEELQLMTMLNGEYDHSNAILTFHAGTGGTEAQDWAEMLYRMYNKWAQAHGMTVEVLDYQDGDEAGLKSASMMVKGANAYGLLKSENGVHRLVRVSPFDANARRQTSFASLEVMPELDNTIQVNIRPEDIEMQVYRSSGAGGQHINKTSSAVRLIHKPTGIVVNCQTQRSQFQNRDYAMEMLKAKLYQIAKQQHMDKIDDIKGVQNEIAWGHQIRSYVFMPYTMVKDHRTNYETGNVDAVMDGDIDEFIFAYLKAASRGELQDAMSKHSIVRWGKIMGAYLLVAAVAALGWLWCVLPEQVYLEPEQPLALPRFGWVEPLRGHGSRNVASTRAAGSYQTTLALGGWLPVKTIRATVMQRPTVTVCGTPFGVKMFSEGALVVGFSEVHTAAGTINPAKQAGLRLGDRVIRMGNTVTETNEQVHAALEAAAGAAVEVVYVRKGEQRQTTLLPVWDTQNAQWRAGMWVRDSSAGVGTLTFVDAQAGVFAGLGHPISDSDTGEQVALRSGEIVACQIVGCTGGTAGSPGELKGKFLSDHALGRICINGENGVYGTVSTAIAGQQTELAFAQEVLPGAAEILTTTSGETPRSYRVYIEKVNDADPRRNMVLRVTDPALLAQTGGIVQGMSGSPILQNGRLVGAVTHVLVNDPTRGYGIFAQTMLEQAHSVPGTDAAAMDKVRFLMSDTGAQITEACREALEQKGVEVTVVEKDGNKVLQKMLAVRPQVVLLDAFMPGLDALAVKQRYNAAGERHTSFFVTGAFQSEEMVQELLDEGFAYYFVKPFDESVLAARVLKAASGQEKHLLHTSVDSDELTVTEILHQIGVPAHIKGYQFLRDAILLTMNEPEYINAVTKRLYPEIAKKNGTTASRVERAIRHAIEVAWDRGDVDTLNSYFGYTIHNLRGKPTNSEFIAMIADKMRLDKRQRVGMPEVDVIRAQLFALQDKEYQIFHSRLMPTLPPETVIGVRVPLLRKLAKQLTDTPEAEAFLQELPHFYYEENALHAFLLEPVRDYGIALAATERFLPYVDNWAVCDSFRPKVFAQHKPELLCAIRRWLSSDRTYTVRYGIGMLMRYYLDDAFRPEYLAWVAAVHSEEYYVNMMRAWYFATALAKQPAAALPWLTEKRLDVWTHNKTIQKAVESRRIPPEQKQALRALRIRSQKLCEERRVMALKYKRILLKISGEALGGEKGMGFDEPTMDAICGGVKKAHELGVQIGIVVGGGNFWRGRSSGKMERTLADKIGMLATVMNALAVSDKLEQLGVPTEVFTSITMPQVAPAFTRKDALRAMDEGKIAVFGGGTGNPFFSTDTATALRAVEVSADVMFKATMVDGVYDKDPHKYPDAKKYDTLTFTKVLEDQLAVMDGTAATLCRDNKLPILVFDLADPDNIARAVQGENVGTLVYEGMSSNTKVYEDKMKSSVEHLSRELAAVRAGRANPAVLDKVVVDYYGAPTPIQQLAAVAVSEARTLTITPWDRTLLRPISKAIMASDVGITPIDDGVTIRLNFPAPNEERRKQLAKEVSKLGEDAKVAVRNVRRDAMDKAKAMKKAGELTEDTQKTMEEDVQKLTDKYIKNIDAAVEEKQKEIMAVMAHPKEFAEGLSIGIIMDGNGRWAKNRGLPRTAGHKKGAAVFKDIANYCDELGVASVYFYAFSTENWKRPLEEVGAIMKLFAQYLIEGFDYKNRNIRIKFLGDRTALDPKLQKMMNELEGDSACKTGMTLNIAINYGGRPEIVRAAQQLAAKAAAGEIRPEDINEQMMSDAMYTAGQKDPDFILRPSGEKRLSNFMLWQAAYSELVEMDVLWPDFTRADLDTAIEEFNHRSRRFGGIMKTRIITAIVGILVLIGVMFTFNTMVFNLVIAAITLIAIHEIYSALGFEKKDWLMYAVLVPYTLLVMLSSYSAMRKLVMPMSFVLVTFFAIYLVVRNGTISYQKASGLLVFSGIVIFCFYSFILLKERLPVEKFGYDAVFFILLILCFAWGGDTCAYFAGRAFGKHKLCPVVSPKKTVEGAIGGVLGTMVFGVVATLIYSIAANRMEAFTRSNIGVSMYVIIALLGCIAAVLGIYGDLFASVVKRQCGIKDYGTIFPGHGGILDRFDSVMFIAPFVTMVITAVFYAMSKKITLLGSTGSIGTQSLDVIRAQGYEVYGLSAHSHVEKILQQIEEFHPKYVCMTDLDAAARLDAALAGRANAPKLLTGPEGLKELAALDGPDVVLNSVVGIAGLGASLCAIESGHDLALANKESLVTGGHLVTQAVEKHGVQLLPVDSEHSAIFQCLQDKESAPSLTKILLTASGGPFFGMTTEQLRGKTRADALKHPNWNMGAKITIDSATLMNKGLELIEAVWLFGLPPEKIQIVVQRQSIVHSAVQFSDNSIIAQLGVPDMRIPIQYALTYPKRVPGVVPELDFTTLKLLTFDVADEETFRCLAACKKAIRKGGLGPCAANGANEEAVKLFLEDKIGFLDIGRLVEAVVDSDSFGGDYTLADVYECDRMARAFVRAHLMSFIITILAALLVFSAVIAIHEFGHFTVAKLCGIQVNEFSIGMGPVLWKKNHKGTQYSLRVLPVGGFVALEGEESPESQQAEAAHTVQEQPAPETEAPVQPTGIPLNEAPVWQRALVMVAGAVMNFVLGFVVLVFLIAAQNEPITSKTIYAIQDGALCGQTGLQAGDKVLAVNGRRCFVANDILYELVRTRSYSADFTVLRDGQKVQLPGVQFDTWQDEQGETHMSIGFSVYGLEKTPGNVLREASNSVLYYGRIVFTSLVDLVRGRESINNLSGPVGIVSAIGQAASYGWQDLLELLALITVNLGILNLLPFPALDGGKVVFLVIEGVTGHAVPEKLQSMLTLATFGLLFGLMIFATYNDILRLITGTVMRQKKREVKIGNVTIGGSNPIAVQTMLNVPVEDIEGNVTQAKRCEAAGCQILRVTCPSPADAKCIEAVKNAVNIPIVADIHFDYKAALACADVGVDKIRINPGNIGDDDRVKAVVDACQQKNIPIRIGVNGGSLEKHILARYGAPTPEAMVESALYHVRLLEKFDFNNIVISIKNSNVPRMMEAYRQLSAVTDYPLHVGVTEAGTYQMGLLKSGMGIGGMLLEGIGDTIRVSLAAEPEKEVEAGFNILRAVGFPVTGPEVITCPTCGRTQYPCTEIANEVEKRLQGYKKSIKVAVMGCVVNGPGEAREADIGIAGGKGEAVLFIHGKPIKKLTGDNILDQFMDEIYKLMKPLVSQLWPQFMADPDFAACFGQVIVEHARMLRQDRQVEFTLRSAAPLDQNLCARLLASLQPDYEGFELKIKNLFGYAMLDEHALRILLEDMKRDGVPINGFLDRSSITITGQNITVGVCHGTKFLQEMGFEELLAKRVAEHTGVTPKVTLQSAVTAAEQQQMEEKLERKIAPPVVKFEKKNTAPSIKVEGLNLTDKPVTIFHGKMFTPKNLTPLKDLGGEGGKCMIWGDVFFTEVKGNYRKIYTVSITDYTGSINLKVRAQEGEDCSKWEGIGKGSTVIVRGDCSYDKYEHDYIVYPYDVLIVERKKREDTAPEKRVELHLHTKLSSMDGFCDPGGIVKLAHRMGHPAIAITDHGVCQGYPEAMLAADDIHKKDPDFKLIYGCEAYFVDDMVPCVYGVKDQPLDGEFCVFDTETTGLDPGVEYLTEIGAVIIRNGEVVEEFDTFVKPGKPITPKITELTGITNEMVADAPSEKEALEAFLAFAGDRILVGHNVHAFDMRFLRAAAKRSGIKLEPTYIDTLTMAQTMYPGLHNYKQGTINKHLELPAYEAHRACEDSAALGRIFCVMLNDLAEKEVTKVSEINTGLGGNREVLKKKYYHLIILVKNQMGLKNLYKIVSEAHVNYFFKKPRVPRSLLNKYRDGLLLTSACEAGELYRAIVDGTSYEELKKIAAYYDILEIQPLGNNAYMVRDGKVDSEERIKEFNRTVIKLGEDLHKPVIATGDVHFTEPEDAIYRAVLQAGNGFKDADNQPPLFFRTTQDMLAQFYYLPKEKAYEVVVKNPRKIAAMIDNNVRAIPRGTYPPSIEGAEQQLRDATWEHAKRDYGDPLPEIVEKRLQKELDSICGHGYAVLYVIAVKLVAYSNAGGYQVGSRGSVGSSAVAHFSGISEVNSLPPHYRCPKCKHSEFITDGSVDDGFDLPDKNCPHCGTRMLVDGHDIPFETFLGFYGDKEPDIDLNFSGEYQSNVHRYTEELFGKANVFKAGTVSGIQDKTAYGYVKKYLDERQRTVNHAEENRLTLGCTGVKRTTGQHPGGMVVVPDTYEIYDFCPIQHPADDVAGGLLTTHFEFKYLHDTLLKLDELGHDMPTFYKYFEEYTGIPVDSIPMNDPKVYSLLTSPEALGVTPEQIDSQTGTFGIPEMGTNFVRGMLVEARPKNFSELIQISGLSHGTDVWTGNADELIRSGTCTIAEVIGCRDSIMLYLLRKGLEPKMAFDIMEAVRKGKVAKGGFQPGWEEAMREHEVPDWYIESCRKIKYMFPKAHAVAYLMSAIRLMWYKIYKPQAFYAVYFTVRGDDIDYEAAIGGAAVARAHMEAVKRRLKEEKNAKDEDVLVSLQLVNEMLSRGYEFLPIELGKSLGSKYVVEDDKVRLPFSALKGLGGAAADALERVTIHGEEYISVEELQQASGVGSSILDRLRQVGALGDLPESSQVSFFMHRFCAAAFYQVWTILNTRCVCFGHFQRKGFYNFQVWKFCGTSRLAFSSEKEAAARNTMQQPLYILRMISGKILRDAIISGANNINNQRSRVDELNVFPVPDGDTGTNMGMTVGSAVRELEALDDSCTVGEAAKTAASAMLRGARGNSGVITSLLFRGFSKALEGKKEADVADIVAALQKGVEGAYKAVMKPTEGTILTVARVASEEAAASDAADVPALWDVVLTAGQKALEDTPNLLPVLKKAGVVDAGGQGIMVIFEGMGKVFHGEAIIAGGEAAPNKAKLSTENAGKGVFTDDLMKVEDITNGYCTQFLINKYEGASAAKMRAFAESNGDSVVCIEDDDVINLHVHTADPGKILSEAIKYGYLTNFKIENMHEQFLARQKQGKSLEKQASAEKAPSQASEFIYAAVDPSRDYGFVAVAAGEGLKAVFTDLAADAVVSGGQTMNPSTEDILAAIQSVPAKTVFVLPNNKNIIMAAEQAQKLADRQVVVLPTRTVPMGITALLNFDPSVNAETNTINMMAAADKVSTGLITYAARDSEYDGKRIRKGEIMALENGKIVSTSTDITKATYRLARNMCKKDSSFVTIISGCDVSDEDAEKVTEIVKAKCPNHVEVSHIRGGQPVYYYMISVEMITSRFPLGNVSFTDGYFSTLVGEATKQCYGVAAMAPRDMTDAVKSMVYGSDYPEKGVRVTQQNGRLVIELHIAVSYGLNISTAARSISHRVKDEVEQATGLKVARVVVSVDDVIAMVFVKKKERTALDNARATLRSGRGMLKAGCAKPIKTESMTNKEKQSVNKIMPTTPIAFFAGNTCWKGLPALCNVPCVRRIPGSIMEKGDMNILFFLSPKQDLMYVYDDFTLRQTLEKWENNRYASIPVLNRKGEYVGTLTEGDILWGLKKYHGLDLEAAEDIPISEFAHKRDYKAVTVTTSMDELVEAAMNQNFVPVVDDRGSFIGIVRRQAIIRYCYDKSRKIEMTRTGRPVKELAGVHMAFNMDPKKCPMPTQDPNVRNKNFKEVALGYTAEMAVNEAKRCIGCKNKPCQSGCPVGIDIPEFIAHVAEGDFEAAYQVINRSSSLPAVCGRVCPQESQCEGKCTRGIKNEPVAIGRLERFVADWHRENVHTAPIVPEWNGHKVAIIGAGPAGLTAAGDLAKLGYKVTVYEALHVAGGVLMYGIPEFRLPKAIVQQEIDGLKKMGVDFECNMVIGKVLTIDELMGEYGYEAVFVGSGAGLPRFMNIPGESLKGVYSANEFLTRSNLMKAYLPTSKTPIRTGKKVAVVGGGNVAMDAARSALRLGAESVYIVYRRGMAELPARKEEVEHAEEEGIIFKTLCNPVAIHPDEDGFVHSMTCIEMELGEPDASGRRRPIEKQGSEFELEVDTVIMSLGTSPNPLIRSTTPGLETNKHGCIVTEGDEGKTSRDGVYAGGDAVTGAATVIKAMGAGKAAAKAMDEYIRNKMYKITEKVALNPTVTKMVIEAPLIAKKAKPGQFIIVRPFEDSERIPLTVAGYDREKGTVDIIFQIVGGTTMELNSLNAGDCVHDFVGPLGRATETEGLKKVCVVGGGVGCAIALPIAKELHDQGCVVHSVVGFRNKDLLILEDEFNACSDELRIMTDDGSYGTKGVVTAALDELVAAGNQYDLVITIGPLIMMKFVVKTCQKHGLKSIVSMNPIMIDGTGMCGGCRLTVGGQTKFACVDGPDFDGDLVDFDEAMARGTMYRPFEAHAREAACNLFKTQEGMMELALITAQQVAVLFLLIGTGMVAVKTGVLKLENKQALSNLLVYIIVPAMVVNSYRMEFSTQILHNLLAAFGMSVLSVLLGTVITLLLTAHKTGSRMPIFRFACIFSNAAYMGFPLISALFGSEGLLYASAYVTVFNILLWTLGYGLVSGGSSVKEVARSLVRTPVLYAIVVGLGIYLLQIPLPALITQPLELLAGVNTPLSMLITGMLIAAGDVRSIVTDKHIWKLASVRMLLIPAATLALFGVLGFHGTAAQVVTLLECCPAAAITSVFAVQFGHDEHFAAGSVVLTTLLSIVTLPLCALIITMVMMEIIIHQAILHVLDTTMDAPVLSGGPMELTAEKNAYLQNHIEKLLASDDIRQCRPLPDSAFKNELEHNQDFVDLSCRIAGVLFDYMHAHTTIPGADLAVVDFTRDGAPWLGILKLNYKNGYTHYTETVEGAPVNSIIQQRACLPTQSGKVEEGALVDLTDYSMRLLEKKYDIDGHKEFYLSTVVFQYTTAQPEKKKLQAIQEAAVQAVQENYAETPHVEAQVAMMIANQAADNDNQVSIQQVRQQLEEEYPLAAVPFDDYVEKSDVLDSAAQPVTVTPARIRRMESRSLRTANGIEVKIPTELLNAESEVEFLHADDGSISLLIKNVILMVDEQLEQIEGVVEDIIYENEDNGYVVFEISGSGVLTVVCGIVGELHAGESVICRGRYENHATYGRQFHAQECETDMPKDLEAVYAFLASRSLPYIGAKTADKIIDMFGAEALEVIANDPARLTKIPGISPDKADRIQQEFKRMFGMRELIAYLAQFEISPRKAMEVFKAFGVGAMQAIASNPYLLCGEPLQLDFRHADSIAQYYHMEGDCAQRLEAALLRTLRHNAGNGHTCLPRAQLLATASNFIHQPPEKLARALDHCIETEELCVKMFDAVPYIYLPDLLAAEQDIADRLNLLAKRGKNTVRELDKNIQILELTQGFAYAPLQREAIRKAMTENCLVLTGGPGTGKTTTVNAILQLLENQAERVALCAPTGRAAKRLSELTGRKASTIHRLLEVDYTGGVVSFIHNDKNLLKCDVVILDEMSMVDVKLFQALIAALRYTCRIIMVGDADQLPSVGAGNILSEVIRSGCVPTVCLNEIFRQAKRSLIVENAHHIISGEPLQKGSKTDDFFFLETDGEAAQRLVCDLVTTRLPRSYGFDPIRDIQVLCPTKLGPTGTQALNVELQNLLNPPQKGKPQLQSAARVFRVGDKVMQVRNNYEIVWNRIGGEQGVGAYNGDIGIVESINLRERSMVVRMDDRRLLYPAENLNELEIAYAITVHKSQGSEFPAVILPAAQVPPRLCYRNLFYTGVTRARRLCVVAGRRDVVNSMMSNIRQNLRYSGLCALLQAGQSPQQLSTEGESPMAQNDIGIDLGTTTIIIAQEGKGVVLNQPSVVAMDTRKNTVLEAGDKALAMVGRTPNYISAIFPLKDGVISDHTMTRELICRFVKQVYSSHMVKPRVAVCVPAAITGIESDAVVEAVVAAGARQVYLIDEPIAAALGSGIDITLPDGRMIIDIGGGTTDIAVLSLGGKVKATSVRVAGNHYDEEILKHVRNKYSIAIGQRTAEELKKHVACCPQKTDFHESMEIKGRSLLTGLPVRVTVSTDDLYEPVMMLSEQIGTAAHQVLEKTPPELAGDIYRNGVMLTGGGAQLHGLTEYLSQELKVEVTVSPDPVNCVALGTAQSLSIGDKLETGFTDATPRIGRRMDLGFDVVVTITGIVLVFLILVLLMAIITLEGKIFDSMNAKKKAAKTAAQAPAAKPAVAPVQQAAPAPQVEEGIPGDVVAAIMAAIHAMGNGKYTLKAVRRGKNGWGKAGVNDTTAPFMTQFIDTLVGIFQSSGFAQFGQPGGWLYAVMICVGCFLLYLAIVKEFEPLILLPMAFGMILANLPGSGIIHMQYFVGDGLEHPMWVEILNNGGLADMLYMGVKLGIYPPLIFLGIGTMTDFAPLISNPKSLLLGAAAQFGIFGTYMGARLLVATGLVDFTQKQSAAISIIGGADGPTAIFVTSRLAPELLGSIAVAAYSYMALVPVIQPPIMKALTTSKERSVVMKQLRTVSKTERIIFPIMVAIIVSLIVPDAAVLVGMLMLGNLMKECGVVDRIQKTAGNELMNIITIFLALSVGCTTSANTFLNTRTLFIIVLGLIAFSFGTAAGVLCGKVMYKLTGGQVNPLIGSAGVSAVPMAARVSQKVGQSENPSNFLLMHAMGPNVAGVIGSAVAAGILINIFGMEKIKLEVAGIPAVLYGKRSRKVYLYVHGKNGSAAEAARFARTACLAGWQVLAVDLPEHGTRKNSREKLVPWVVTRELQTVYARMQPVWKHIRVYGVSIGAWFAMQALQTQTPEKALLVSPIVDMEKLILDLMQQAGVTEEQLRTAGEIPTDFGETLSWPYLCWVREHPLHWKVPTQVLYADTDPLTGHTAMEQFRQQTRAHLTILEGGEHWFHTEIQLAALQSWESCHLMNTLVIVLIAAVCLFGAYVLYGRWLANKWGIDPAAKTPAVVHEDGRDYVPTNGWTVFAHQFSSIAGAGPVTGAIQAAAFGWLPVLLWVLLGGIFFGAVTDFGALYASVKNDGKSMGMLIEKYIGKTGRKLFLLFCWLFCGIVIAAFADMVAGTFNAFGADGAMVEAAKTNGAAGMVSIMFMVFAVIFGLLQKKFSFSGWKESVISIVFIVLSFVIGANLPLILGKAAWSYITFVYIFFAAVLPMWLLKQPRDHMTTFMFVAMIVGAVVGLLVAHPTMNLPVFTGFTNEKLGTMFPILFVTVACGAVSGFHSLVSSGTSSKTVENEKDMLKVGYGAMILESLLAVLALCVAGAAAAADGTPAAGTPFQIFSRGVAGFFEMFGVPAYAATVFMTMCVSALALTSLDAVARIGRMSFQELFSVDDMEHAEGWRKLFCNVYFSTFITLVFGFILTKIGYANIWPLFGSANQLLSALVLATLCVFLKVTGRSNKMLFPPLVIMLCVTFTALVQRLIAMVKAISTAASVTIPAGETTWGAVFIANGLQLILAVLLIVLGLNIVFHSFSAYKKAEHNSEANVMNGFQLRAYSVLFSSHMKENHLKIIPRKWLELAYPLNLLQKYMAEKNSRRNETTDALFDAILSLESREECYAFFEDLCTVKEISDMAQRLQAAKLLLDGATYEQIVKAVEISTATISRINRCIQYGSGGYRDTIEKVRAQAEKQMMIDTPCVRSQCPEMPKVSLDQAVVDLMESIALQETALSHILCAESRKMQKAMDLDGLDLCKLLEVNDSATNMVHAVANLELVLKDKLEFVSNNLYVPGDSGCPSPAQMFFAWDDLYCNLTRENAMPGSPQAARHCSESFCRKGGCCTKQGAAASLFMKILHKRQKNLLLELLMYQICAILLDVSPMLHYDAILFDVDGTLIDSAPGIIHTLQEVFCTMGVDVSGINLRRYLGPPLRKSFGEHFTDPALIEKATDLYRTSYAVKGSHECAVFPGVLQMLQTLKQAGFILCTATSKPTKVVTPILEEQGLAQYFDFIGGASMDESRDTKTEVVRYVLSQPALLGKRVLMVGDRNDDMRGAADCGLDAAGVLYGYGSREELEAFHPVLLAESCADLTDRLLAARVMRSNNQQENQTLTPMQKQAVLVCIVCALAALLTIGITLTMLKRGKNPTEQPGDSSIITPAPAPEGEEDISDHYQINETSSALLTGTADAGDAYQEQTLFIGDSNTVRLYANGLISLQQFCAKEGIGTSAALNEGIVTFKRDDNRYTIAQAVAKMKPRRVVIMLGTNDNGMNTEDFISNYTALVQAIQASYPYTDIIVNTVPPVPSNHSNYPNMDQTRIDDFNMALLTMCEQLGVKFLNSAEALKDANGYGNVDYYQSGDIHLKPAGLKVLLKYLRTHAYETEDRRPDTNNIPTRAEYTANPSSAVEAPSSSEAVSSSVVEEKTEYQADYRVDKAGGGSLTCGDESGKSLTVKVTSAAQSVKVTAVPEDGYVFVKWSDGVTKRTRTDTNFDQNVDVTAVFAAASIQVSSSGKAGLGDSYTFKATLKGKYLDASSIRWYVNGTEVTQAAGKTTVKGEVDPSMVGGTFRVYATASYNDCTVTSNKLELTVSGGTSGSTSSSSSSSSSSASSKEDKPASSKEEMSSSKEEKPASSKEEKPASSKEEKPASSSSNGTSESAGSSSKVEKPASSAASSKEEKPASSKEEKPATSKEEKPASSKTEASASKEAANMYWEAMRTPSLPGENDVTNGSVDYYDTDWENVDNSALEEEMQKCGLTPCEGKTMCPDNAPAQTDLSAYEIVSEMAKYYCILFDADNTLLNFDAAENKALAETLVNYGIEPDAETVQTYRTINEELWRQLEKGQIRREKLFGERFSRFLKAIDAAGDGVEMNRFYLEQLSTHPDLMSAEVLDVLRELSEVATLAIVSNGAQMVQTRRLAESGVMNFMEDVFISEKMGCEKPNARIFDAALRALGVENREHVLMVGDSLASDIQGGSNAGLDTCWYNPNHAENPGKVIPTYEIASLEELYPLVMEQEELANVGLKNRRHQCMLIHLEKLGKTFGEKVVLHDVTASVEREDRIGIVGQNGAGKTTLLKILTGEYQDYEGEFSVTHGVTLGYLEQNAKLDATLDIYGEMRATFAPVLDAMAQMQILERRMAAQPDNADLLAQHDALQNIVDAADGYNMDVNIKKVLSGMGFAQDTWQKNIAVLSGGELTRLRLAKLLLEKPDVLILDEPTNHLDFATMEWLENYLKGYSGAVLVVSHDRYFLDNVCTKIWEVSFQTMTTYKGNFSAYLPQKEAADALRQKQHDADVALAEKLQDYVDRNLVRASTTKMAQSRRRQLEKLEITEAPKDETNQLKFRFEYDVEPWNELVMLKNLSIKIGERTLLEPFTYTVCRGQRLIIAGPNGAGKSTLMQVLDGKRRPSGGMVRLGTGARPSIFAQQQNRLGQGRVIDVIWNKYPRMTELEVRSHLAKLGFRGDTVFKPCEALSGGELARLRFAEIVLERPNLLFLDEPTNHLDIYTRENLTEALMAYTGTLLLVTHDRHLMNSLACPILYLEDGKAVLYPSYDALMGRAAPVQAAQKAAEPAKTGYGKEQRRRRAELRAKIKACEDEMEACGAREVELDNEINSPEVYNDPDLLRQKSDELSDLRFHQEELFAAWEAAMEEQEAYEQTQQPEEMPKNHRNYQKTRHIALSGLLFALAMALSFIEGTLVIPGLLPGMKLGLANIVVMYALFFMGPRQALVLDILKALFVFLVSGFTAGFLSLCGGLLSLAVMWVLYYFLPVRPTWFILSVCGALAHNVGQLLGAGVIISSSLSLYYAPVMLVLGLVMGALTSVTLRALLPALGKMGFNTHENRPEMAGNLYNKETTVFLSKRPQRIELPQHGNLSGSREVFVYVMSEKVTIKVERKELHLPTIALRGLVVFPNNLVHFEVGREKSIAAVEWAMANNSNVFLVAQKEMETSEPTQQDLYTYGVVAEVKQVLRVSDELVKVLVEGKYRAKLTELDTTGDFLLSAVRSAPVRAAKPEEAVETEALLRALKTGFDEYLGMNPRLAKDVVFTIVSSDDPMFLTEYMPANLLFRYEDKQAVMNENTLNGRLQRLVEMLRRECQVMKIEKEIAEKVNESMDKNQRDYYLHEQLHIINDELGEGDDTHAEADDYRRKIRELHLAEDSEKKLLKEVDRLSRMQSSNQEATVIRTYLDTCLDLPWNTMTVDDLDIHRAQQILDRDHYGLKKVKDRILETLAVRKLAPDVKAQIICLVGPPGVGKTSIARSIAESLGRKYVRISLGGVRDEAEIRGHRRTYIGAMPGKIISAMITAKSSNPLMLLDEIDKLAGDFRGDPAAALLEALDPEQNSTFNDHFIDIPFDLSHVLFITTANDLGSIPGPLRDRMDVIELPSYTRVEKYNIARKHLLPKQLKACGLTGKVTMNQSALYGIIDGYTREAGVRNLERTITSVLRKCARKIAAGEVESVAVTATMLEELLGPRIVKPDFLNRTNAVGIANGLAWTSVGGETLPIEVQVMDNGTGKITVTGSLGDVMKESAQLAVTWVRVHAEEYGIDPERLKKCDLHIHAPEGAVPKDGPSAGVTLTTALVSCLSGVPVRGDVAMTGEITLHGNVLPIGGLREKSMAAYREGMKTVLIPKDNEPDLYDVDEEVKKNLTFLPMQNLSQVLAAALLKPKAAKSTAGRPRTKKSKAGESRIPAAPEKNQPGAVCMIFNKADFIASYGISSQLPESDRPELSFSGRSNVGKSSLINKLCSRKNLARVSSTPGKTATINFYSVDDCYFVDLPGYGYAKVSNADRERWDDLINSYFEAPRHHTLLVQLLDCRHAPSADDLQMLRYLHYHRIPYVVALTKADKLKKSQLAKTQEDFENICRPYGCQKVVLTSGENGYGIPELQAVLNAAVAAENEEAEMAYNEFAYFYDEFNGEADYDALYSQIHAKLEAHGIHDGIVADLGCGTGELTLMLTQAGYDMIGIDQSEEMLCVVRDKAEQLGLSGRLLLLRQDLLKLDLYGTIRAAVSTFDTFNHIPDLDTAIANAGFFMEKGGVFLFDMNTPYKHQKVLGDNEFTFEEEDAACVWHNHYNAADRKVEITVDIDYHETGEHFHEEFCEYTYDLATIRAALEKHGFALESVCDGETFGPLTEESQRYFFCATKQYTQLEEMANLIRGLSENGGVVFCGVDSTEIVRKAEKLHTTSATCSAALGRLLTGATLMGSMLKDDRDRITLRVAGGGPAGVLIACTDGTGNVKGCIDNPLVELPAKANGHLDVGTAVGKDGVLTVIRDNRLQKEPTVGQVPLVSGEIAEDLTSYYAYSEQVPTVMALGVLVDKDLSILCAGGFMVQLLPGATDAEIDQLEKNISAMPSVTELLHAGKTPEDMMQLALAGFTPNVLDERTVQYQCDCSAERTKEMLLSLGRAELERMRDEDPNCEVVCHFCHSKYQYDLNALLAEYDAQAAQAAEAEHPVQMEWSPLCSDHVQRKDYCLFTGLENLRIFQTCLFTRGVERENFSYKSNLLRKRRSKKGGCTMEAASLWAGVRFTARNGSPEALLTDAAGQGLHLYGIFSLPGGFYGHCAAWQYRRLAALARHRRVRLRVEKRMGLYFLLRPLLRRKGLWVGLVAWGLVLLWLQGLVWAVDYGSLTTGQRARAGAVLRSCGLQPGTAVTEELLRTGEYSLLESGEFSWASLNFEKGRLVVEAAPARARPEIAAGTLHGLRAKCNGTVLRTNLASGTMLVAPGQTVEAGQGLIGTARSERDGTLIFAPAAGTVVAQLEWQTDQSVPLAETMSLLTGENKTNYRLFFAGHSSALSPSAPDRDGLCCTRHLQLEVFGLPLPCAVEETTYYGQQQETLYHTEVQALTLARLQGLRALHDAFPDAEILARREECTVQEETLHYNAVYTVAADICTMARAHHDRRTPGDWLRGLFRQPPPGFYSRPAVYLSGDRMEIEHFCTVLFFDENRLCLRLAKGRFTVYGSGLRICTLTAARLTVQGQFLRTDFSDEMSKSCKPLHPGLFLLGAATAALVFAAPQTCAEALRQGLALCGGPLLVSLFPFLVVSALIMRSGAGEVLGVLLWPVVRCIGLRSRSAGSVLLIGLVGGFAPAAAATAEAVRSRELTSQEASALLPACICSGPSFVILTVGEQLLGSRTAGVCLFAAQVLAGWLTAALLCRVRGIPEPLPAPPAAAQTEPPPALDTILAQAAVTYLKLCGFVLYFRLLAAGCGLLLPAALAPFPAMLLEVCSGCDYAARTGLWASGLCCAALSVQGTSVLLQVRTLCPPEVSFKPLLWGRVLHLPLSLALFYLGLPQSAVESFNTLCARVVPMRRVPTDCALLVFAVCCITACEACRLTEKRHKTQLRQTKTALRLANRRKMWMQAMIDELAKQAAESLGQVSSKETLASFWQEYLSKNGKIPALMKNLRTVAPEERPAMGKIINELKQKVQADYDAAAETVKQAELAARNAAETVDITLPAKTRPVGGLHPLTLVANQIIDVFSGMGFAVADAPEIEDDDHNFTRLNVPKDHPARDMQDTFYLSDEFLLRTQTSGGQIRTMDSQKPPIKVLIPGRVFRSDSDATHSPMFHQMEGLVVDKGITLGDLQGALNTFVQKLFGADTRTRLRPSYFPFTEPSVEVDVSCFECHGKGCPLCKHTGWIEVLGGGVVNRKVLENCNIDPDEYSGFAFGIGIERIAMLKYGINNIGLMFENNLQFLKQFHEMKVPFSWLKEFVDIDVTAQELEEKLFSCGFEVEELIPLDAGISKVVVGKIVEMEKQEGTHLTKCVVDCGAYGHEIRISTGAANMKLGDCVPTALDGSTLPGGITIKARKMQGVESNGMLCSGAELGLNDDLFPGSEVYGLLILPEDSVPGTDIAPVVGLDDYIFDISITANRPDCQSVLGIAREVAAVLGKPLHMPAMDYKAVCEPDAPITVKVEAPELCPRYMAHYVRNIRMGESPRWMKRHLALCGLRSISNVVDITNHTLLEMGQPMHAFDLNKVAGRTIDVRRAHEGEKIVTLDEKEFTLNPNNLVICDAEKPVALAGIMGGANSGMDDNTTSLLFECATFARDSVRKTSRALGQNSDSSARYEKGVDRYSPQLGLARALHLIQQLDCGDITTLEYDLSDGRPLERKHIVTTPAKICGVLGITVPDQTMIDILQRLEFTVDVQADGSWDVSAPLYRDDVEGFPDLAEEVIREYGYDHIVPTFLNTASVTNGGLNYDQKQQLKTKRLLAAQGFYEASTLAFYSNAELDMLHIPAEDEARKAIRILNPISENLSIMRTLLTPSMLNVIVDNLKKGNAEGRLFEMAPVYLAKELPINEHPHERQTLCIGAFGPEEDFFTVKGALEALAAGFGLTFDYQRETAAWLHPGISAAVYCNGKRLGVFGKLANEINAELEIAKEQKDSQNIYLGELDYEALMSCVEGELRYKPLSPYAPVKRDLALVCGEAVSCGEIEETIRKASPLVSEVKLFDIYRGANLGDGKKSMAFSLSLSDPKKEVSAEEVERVVKKILGNLKFKLGIEIRMRRSLAADDLIILPQKWFFVKHFFEKLLKFYELGAFRTSQCQLVFFSVYWFFSRASCSNEKAFMLMRQFGFHVDGHECIEVKEGDTFSFGRHTVTFVGAPMVHWPEAMVTLDVTDGVLFSADAKYGNRHFWARGYFVDTVGKNKKKIQEYIKNQLQQDQIADQLSLKEFVDPFTGSKETKAMSGATNKITALYCRLSQEDARLGESLSIENQKAILLEYAKKNHFPNPVFFVDDGYSGTNYDRPGFQSMLAEIEAGRVGIVITKDLSRLGRNSALTGLYTNFTFPQYGVRYIAINDNYDTIDPNSVNNDFAGIKNWFNEFYARDTSRKIRAVQKAKGERGVPLTVNVPYGYVKDPENPKHWLVDSEAAAIVKRIFSMCMEGRGPTQIANQLWVDKVLTPTAYKLSHGLSTNSPAPEDPYRWDKRAVSSILERREYTGCTVNFKTYTNSIWDKKRHLNPVENQAIFPDTHERIIDDDVFEKVQEIRSQRHRMTRTGKSSIFSGMVYCADCGSKMQYGSSNHRDFSQDFFDCSLHKKNGSKCKGHFIRVKVLEGRVLSHVQRVTDYILRHEDYFRKVMEEQLRVESTEKLTVLKKQLARNEKRIADLKRLFMKIYEDNVNGKLSDDRFDMMSQSYDAEQKQLEEEVLSIQQEIEVQEQQIENIEKFVQNAHKYVHIEELTPYALRELVSAIYVDAPDKSSGKRVQHIHIKYDGLGYIPLDELEAKEKAMKKEIEAFVNAANEQELEAAWNNLSAEEQRVFEQLMEEDSPEDALAFFAQLYDDAPKEQTSETVSISENEIYFKRKPLTEEQKKHGSYVDENGNLHVKNLSAFWIPELTTTEKVGHTTYTVTGSYEGKESFLKKLERIVAKNAQQKFEDEGADEKQGLGQARPNKKQSQRGQEIFEYMTNEDTTDFDEHFAKISSYIVDTLHGIPLEMTEDEKEQFRIQVISNQYAERLLGAPMVHWPEAMVTLDVTDGVLFSADAFGTFGSLDGKLFADEVDFERDWLDDARRYLTNIVGKYGPHIQLLLKKAGGVLDQIKYICPLHGPVWRKDLGWFIEKYDTWSRYAPETQGVLIVYASMYGNTENAAQALATSLCDKGMSKVAMYDVSSTHVSQLISEAFKYSHIVLASVTYNLGIYDDGFSGVNFNRPGFQSLIKEVEAGNVETLIVKDMSRLGRNYLQVGFYTEVLFPQKNVRFLAINNSIDSNNASDNDFAMPKEPKITALYERLSRDDDLAGESNSITNQKKYLEDYAQKNGFKNIRHFMKLETGICGEQSVRVSAENTAKTMGSGTLDVFATPALVALAEKTCWQSVAPALEAGSGTVGTKLELEHTAPTPVGMTVTCHSELVAVEGRKLTFKVTLADEKGPVGGGTHERFIIFEEKFAAKAEAKKGMPDYKAMYFELFRASVQAVQLLQDAQTRAEQQLLAADLPPLRLDETEPDDPMKNKNLSWVGALFVFALLLWCTAVTPGKVADPATYTCAVYSTFFSLLPPVIAIVLALNTKEVYTSLLVGIASGALLYANGNLELALNTLFFNEDGGMITKLSDSGNVGILAFLVMLGILVALMNKAGGSAAFGRWASTHIHSRAGAQFATLLLGVMIFVDDYFNCLTVGSVMRPVTDRQKVSRAKLAYLIDSTAAPICIIAPVSSWAAAVTSSVPAGSGINGFTMFLRTIPYNYYAVMTVVMSLFLIFTGAEFGPMKLNEDNAKNGDLFTTADRPYGDDVDDGNDTNGHVIDLIAPVLVLIAACIFGMVYTGGFFEGVDFITAFADCNASAGLVLGSSIALLFTFVFYRVRSVMTFQDFAACIPEGFKAMVSPMLILSLAWTLSGMTGLLGAKYYVANLLGSSAAALQYLLPFIIFLVAVFLAFATGTSWGTFSILIPIVCQAFPDGEMLVVSIAACLSGAVCGDHCSPISDTTIMASAGAHCSHVNHVSTQLPYAITAAACSAVCYIITGLAQAVLGNRASLVTSLVLLVVAIVLELAVLSVIRARTRAKTSGDAAMLEKAFQDVYTKFKLHFYQNVFQRFATREATLTTVESFCMEGIMAMGEPTIAEFSRMMQISTPNAAYKIGSLVKKGYVEKIQSTTDRREYHLRPTQKYIDYYNISYSYLHTVVERARQRFTPEECAKLEQMLTIVSTELMPELDILKKGEDMWFVYALGSAVFAALTSILAKIGIEGVNSTLATAIRTAVVLLMSWGMVFLTGTQTGIADISRRSWLFLVLSGLATGASWLCYYHALQIGAASKVVPIDKLSVVITLALAFVVLHEPFTAKSLIGCALITAGTLFMVLMEFSLEHLQPKERASFALRSLYETAGCRKYHMGRFEEYSLYQENRSFLSSEQVITFTDLDGRLLALKPDVTLSIAKTAQPAPGETLRYYYHENVYRPSAESHTFKEISQMGLEMLGAVGEAEVQQAVCLAAQSLAALGAEWVLEVSHMGYLFGLFDALGVPEAARAQLLEKLRQKNAHELRAAALAAGLSETAADALCGVLELSGGYAATLSKAAALCRNPAMTAAVAELTALAPTLGHAGGSIRLDLTLAGEMEYYNGLVFQGYLKALPRPLLKGGRYDLLLQKFTPGAGAIGFAVYLDELDRLNAMPPVQHQDTGKVMLNVALPKGRLGDKVYNLLAGIGYGCPEDYNATRKLVVENPAAGIRYFLVKPSDVAIYVEHGAADVGIVGKDILTEAAADVYELLDTGLGRCRMCVAAPAGYRDDPSRPVRVATKFVNIAKRYYASMGRDIDIIKLNGSIELAPILGLSDVIVDIVETGTTLRENGLQVVTEFMPISARFIANKASYQFKHRQMDTMLEKLRDTLHKQEEEKMIKLYNFDELKPEEILNRDIRAEKNVEDVVDAIIADVRARGDDALKDYALKFDGAAIENLQVTQAEIDEAFAGMDAYFLETLRQAAENIEQFHRQQVHKNFVMNDRPGIVLGQKYTPIEKAGVYVPGGTAAYPSTVLMDVIPAKVAGVSEIVMTTPAGKDGKVNPVILAAAATAGVTKIFKTGGAQAVAALAYGTQSIPAVDKIVGPGNIYVATAKRKVFGKVGIDMIAGPSEILVLADGSCNPAWVAADLLSQAEHDKLASPVLVTDSAALAKAVQAELEVQIPQLPRAAIARASVDDNGKIILCTDLHKAIEACNIIAPEHLEVCVEDPFGVLNEIRNAGSIFLGRNVPEALGDYFAGPNHTLPTSGTARFSSPLGVDDFVKKSSFIYYTRDALEAVAPRIADFAEREGLHAHARSVTIRYEKMSRFLSPVLSAVTPYTPGEQPQDQQYIKLNTNESPYLPSPRVVAAVSEAEVEKLRLYSDPACAQLLRTAAAHFGLQPSQVMPGNGSDENLFFALRAFCDESHPLAFADITYGCYGVWCGLLHIPTHIIPLKEDFTLDPADYHGLHETIVIANPNAPTGLCLPREAIEGILRSNPDSVVIVDEAYVDFGGESCVPLIDQYDNLLVVQTFSKSRQLAGARLGLAMGNAALIADLNRVKFSLNPYNINRLTLKAGQAALEDTAYFEKTRAAIMDTRAWTMQQLTDRGFTVLDSRANFVFASTKRISGCKLYKELKKNGILVRHFDAPRIENWLRITIGTPEQMQALMDAVDKILEVMAERMVTLERNTNETQIELTLDLDGTGRYEIDTGCGFLNHMLELFARHGRFDLVLTCHGDVQVDYHHTTEDVGIALGQAFARALGEMRGICRYGSFYLPMDEALVLCAVDLSGRCTLNWDIRCQTEKVGDFDVECAKEFWYGFARSVPATVHFVQFAGENTHHILEACFKGAGHALAEAVRIDAAHRDEIPSTKGLLVMIAILDYGVGNLFSLRSSLQQLGLQAVVTADAAVLRAADRLILPGVGAFGDAMAKLTATGLVPVLKEQAAQKPLLGICLGMQLLFEKSYEYGEHAGLGFIKGEVCPLGPDLADKSLKVPQMGWNALHIVKDDPLFRYIREGEYVYYVHSYYGKNCAESTLAVSDYSIPVTGAVRAGRVYGTQFHPEKSGDTGLRILKAFSELCGTLMGGESGTSHMGNTYYYYKCGNAKRHGKAHCDLKAIRKEPLERFVVDTAIKVIFNDEIIEQLIDLVMEAQQQENTRLPVLKEQLRDTEKRLANLLEAIEQGILTPTTKQRLDELEARKEALNTSILEEELKKPVLTREWIRFWLEKFRKGDVGSTEHQRQIHGTYNPKHNDRSFNLANSEHIDPERAKGNIYWDCFHGFRSALDPQDPDDLAATFSDVERQFYETHYTAFVESQNERVSQLISEAFKYSHIVLASVTYNLGIYPAMHDFLMDMKALNLQNRTFAIIENGSWAVKSGDLMQKFVNNELKNMTVLNERLSLASSMGTDKRTELEALADAILESMKVLKLTELDIDTCWMTFTDSDKIKKALSLATPLEVAAIVAFGYGEKTAKKLRLNILSMSQIDVRAEQQYYAPKKGVTETNAGSDAGGTETTALDKGDYYLLNGGKIFITNAPKADTYVVFAVTTPDIGTRGISAFIVEKGWKGFEFGDHYDKMGIRSSSTAELVFNNVKVPKENLLGKEGEGFKIAMSTLDGGRIGIAAQALGIAQGAFEHALSYSKERVQFGKPIAAQQSIAFKLADMATKLRCARFLIYSAAELKEQHAPYGMESAMAKMYASDIALEVTNDALQIHGGSGYLKGMEVERAYRDAKITTLYEGTNEIQRVVIASHLLGRLGKSSGGESRSAAKKPAPITGIRKKTIFREGDAAQQVADLVAALKKDGHDFSVGIPMDTPIPQAERVVSAGKGIGEKKNMKLVESLAKAVGAAIGSSRPVAETLKYLPLNRYVGMSGQKFTGNLYIACGISGASQHLKGIKDASTIVAINKNGNAPIFKNCDYGIVGDVEEILPLLTAALDSGEKLPAPPMVKMKRPTPPKPAPIGDRYVCSGCGYEYVPELGDEDGEIAPGTLFEQLPAEWVCPECAETKDQFVKAMYCVRKVTNDLYWVGANDHRLALFENCFPIPRGVSYNAYCLLDEKTVLFDTVDWSACRQLLENLAYVLDGRELDYLLVNHLEPDHAACIEEILLRHPKVKLISNEKAFMLMRQFGFHVDGHECIEVKEQLCEQKGIEIIEAEACPDHIHMLISFSPKYSISYVMGYLKGKSSLMIFDRHANLKYKYGNRHFWARGYFVDTVGKNKKKIQEPKQNQSELKRCQKRYDELSALIRSLYENLMSGLLPERQYKQLMAQYDSEQAELESQMETMKSEIAEDKSSSADIRHFISLIRKCKSPTEISDSMFNELVDKIVVYEAEGTGNARTQKVDIYFNYVGQVDIAYAEEELAELKVQKEQEERQRMEKQRKREKAYREKRKAKKIAKNGGEIIKTKTCPHCGKVFAPTSNRQIFCSRDCWNQARQEQKEAAREAERGGHCYRQRACAVCGNSYWPTHSQQEFCSDECRRINHNKKTLEFYHKKKGNPKPDPEATPTPKPKEDNAAMTTMKNSIHDNANGLDYTLVNDHYLPNLTVVAPTEQHPTGRWGRLHKRYLKEHHPIRYNQLLLSGELGGYLAKLDKQVEEQLALTVRQMRDSAVGMKRNQNFDHNHSQKVLSCRYNMDTNRVEARFEDGTTLSIDCIAIEDEYGNTPAQRAELDWLLYNKPLEYAQLVLGGEIEHYLSLGCDHGRLEDMKKSLTFSFAMLLGVAVLLSPVSNALEADMSSSITYRPEDTQICYVSEIDEVISNTEIDKSVRQTVKERARTGATFYSMTPESQEQIEQLFGVHFVENALLDTMEHSIAQKDQMNVFFNSSTKVTETEYTRYWLDGNVSISLCANTFYDVDGMCGSQKTYTKRFPKQNYSISKKLYTSKSGKCFAIYTIQDHAGCTIAQYTMFQHHATDYALYVRNENAQKSETAGIPNDYLLTLLDSFSFENMKHDKLFLVRILCLIGIAGELLIPNNIIRMLFGLFFAIISVAFLLMHKNDIILEESDRKNNYSISIICISVILLLFIIVSYIILKALRVIVLSDSQEIFLSEILVFGFMAIFGNCSKKLPFNKYVGLRLPWTLDDCQTWRYAHMLLYELTFPTILLGITILFSLPNKSKAVMIWSILLYIGTPSILSYFYCRKRHMSKIIGALLLVALAVRLVVLFFFKRNIVLNEISLVLFIAVFVVAVIVMLVKWWKWRTKMKKIQNFFSYAKVSELPTNQIFELFDLSNNGKDVSPYKIDYAVNKDILDECQLGAYESLIELNNEVALLYDNGKIVALIGYVVQMKKAYYGLLTFAIMSLSYDLYYWNMRSAVGVLRAEDKVLCLSSGGICVLIIVFVVIKSIKNKMKFSPLELLLVISIAVIVGIVLVVLVKYLIRYAIKFLRKNMARYRIAVCDDEPSELEDIVQSVKRYDVHGDFDIENYTDGAVLLSDLQLKKNFFDLLLLDIEMPSNGFQIAQTLTQMEKHPLVIFVTKRHEYAVQGYGIAFRYLVKPLDKSLFTAAMDAVVQELDSKHFTVEYEGATLSLETSDIYYLESHGHKVLIHCKGQDLTLRMTIPEALEQLPKRCFASPHKSYLVNMEHIVYATGTTVVLSSGNQLPISRRKRQEFNQSFNAYLGRMIYYFVEFAGSFANIALLVLFVGRLFQKKDLYLRWFYLYIALLMAGQCILSLFPTWVMPRTIYLLLGGFLLAMLFYEVQLWQAIFASAAFFTLIAVVEVLAMLLIGLRIPDTEILMQAGAARLIYVVFSNLIQIPLVVLISHFFSRKENVLRILWLLPIIAIQIASIAVCYVVQYHAADGNFPDYLIGFMAVLLLINILIVFYVEALRKNEQEKFRAEFNEQQYRLQMEYYQQLKERQEETRALWHDIKKYILAMQAVAERGNPEELHKIVRDATDAFERSKNISTIGNPVVDALLNQCLHTAEENGIKVTLDVTIPEVLSISPLSLSILIGNTFDNAIEACSGLPPEQRKIHLQLRKQYRSLFYRLDNPYSDISRSLRVGSHHGYGLKNVKRVVRESDGDFYAEKKNGTFTVKVRLNCENMAFYFLKKERDAMTQPKTDIAYLRNEKAKAEQKLRSCQNREKILERQMSELNRRERVHRLCTRAGMLESFLVCPGELTDDQVMELLKISFRQPEVVLALAKMVHDVHERSNVQNPLERTKLEEMKDIHLYETVVSLRGALNQTNEAQMDALVAELCAEMAAMNMNQEQFKQLIREEKPVLVDFWAPWCSYCRRIGPAYEKIGEEYADSLAVGKINIDEEPQLAGAEGIEDIPTLMLYRNGKAVDSIIAPGSKAEIDRFIQEALAKMNNNHVYDMLVVGGGPGGYTAALYAARAGLDTIVLEKLSAGGQMALTEQIDNYPGFEDGIDGFSLAEKMQKQAERFGARSEYAEVLRMDLTAVPKLVETSEGIFLGKTVVLATGANPRTLGVARESELVGRGVAYCAACDGMFYKGKTVVVVGGGNSAAADALLLSRVAKKVILVHRRDTLRATKIYHEPLAQAENVEFRWNSVVSALLSGDRLTGVRLRDTVTGEESVVDCDGVFVSVGRQPATALAVGQLALDGGGYIVAGETTETSIPGVYAVGDVRTKPLRQVVTAVADGAVAVHMAEKYIAENRRKDDVVTFEQLGVDRLFVDESQAFKNLYLYTKMRNVAGLSTSEAQKSSDMFGKCRYLDEITGGRGVIFATGTPLSNSMTEMYTLMRYLQYNTLQQKGLTHFDAWASTFGETTTAIELAPEGYTLIGRMPKEPKITALYERLSRDDDLAGESNSITNQKKYLEDYAQKNGFKNIRHFTDDGFSGVNFNRPGFQSLIKEVEAGNVXXXXXXXXXXXXXXXXXXXXXXXXXXXXXXXXXXXXXXXXXXXXXXXXXXXXXXXXXXXXXXXXXXXXXXXXXXXXXXIFEYYERMVCQRHEQMIITKETDYALRILRVLLDGEKHSVAEMSETELIPNQFAYQILRKLSAGNLVRVSRGALGGCELSCDLDATSLYDLMGVVGERGILCACMEPGYECRWQDKHGRCTIHCQLAALQQKQDEAFRAVSLRRLLTGGSDSQDTSKLMLFQTTSAHEELRAKIRSFAEEEIKEQYNGTKFSNPYLWGTSSVRTILGRQEYLGHTVLRKSVSTNFKLHKRKETDEDEQYVFQNTHEPIISQELWDSVQKRRCRVNRASAWGTHTNRLSGYLYCADCGRRLTLQTHYSKKDGSTQYSYRCGGYASRVNGCTAHSISADNVEALILASVKRFSRFVLKDEETFALELQSLWKEKREEKPKQNQSELKRCQKRYDELS
